(19) United States
(12) Patent Application Publication
(10) Pub. No.: US 2002/0090615 A1
(43) Pub. Date: Jul. 11, 2002

(54) Nucleic acids, proteins, and antibodies

(76) Inventors: Craig A. Rosen, Laytonsville, MD (US); Steven M. Ruben, Olney, MD (US); Steven C. Barash, Rockville, MD (US)

Correspondence Address: HUMAN GENOME SCIENCES INC, 9410 KEY WEST AVENUE, ROCKVILLE, MD, 20850

(21) Appl. No.: 09/764,878

(22) Filed: Jan. 17, 2001

Related U.S. Application Data
(60) Provisional application No. 60/179,065, filed on Jan. 31, 2000.
(60) Provisional application No. 60/180,628, filed on Feb. 4, 2000.
(60) Provisional application No. 60/214,886, filed on Jun. 28, 2000.
(60) Provisional application No. 60/217,487, filed on Jul. 11, 2000.
(60) Provisional application No. 60/225,758, filed on Aug. 14, 2000.
(60) Provisional application No. 60/220,963, filed on Jul. 26, 2000.
(60) Provisional application No. 60/217,496, filed on Jul. 11, 2000.
(60) Provisional application No. 60/225,447, filed on Aug. 14, 2000.
(60) Provisional application No. 60/218,290, filed on Jul. 14, 2000.
(60) Provisional application No. 60/225,757, filed on Aug. 14, 2000.
(60) Provisional application No. 60/226,868, filed on Aug. 22, 2000.
(60) Provisional application No. 60/216,647, filed on Jul. 7, 2000.
(60) Provisional application No. 60/225,267, filed on Aug. 14, 2000.
(60) Provisional application No. 60/216,880, filed on Jul. 7, 2000.
(60) Provisional application No. 60/225,270, filed on Aug. 14, 2000.
(60) Provisional application No. 60/251,869, filed on Dec. 8, 2000.
(60) Provisional application No. 60/235,834, filed on Sep. 27, 2000.
(60) Provisional application No. 60/234,274, filed on Sep. 21, 2000.
(60) Provisional application No. 60/234,223, filed on Sep. 21, 2000.
(60) Provisional application No. 60/228,924, filed on Aug. 30, 2000.
(60) Provisional application No. 60/224,518, filed on Aug. 14, 2000.
(60) Provisional application No. 60/236,369, filed on Sep. 29, 2000.
(60) Provisional application No. 60/224,519, filed on Aug. 14, 2000.
(60) Provisional application No. 60/220,964, filed on Jul. 26, 2000.
(60) Provisional application No. 60/241,809, filed on Oct. 20, 2000.
(60) Provisional application No. 60/249,299, filed on Nov. 17, 2000.
(60) Provisional application No. 60/236,327, filed on Sep. 29, 2000.
(60) Provisional application No. 60/241,785, filed on Oct. 20, 2000.
(60) Provisional application No. 60/244,617, filed on Nov. 1, 2000.
(60) Provisional application No. 60/225,268, filed on Aug. 14, 2000.
(60) Provisional application No. 60/236,368, filed on Sep. 29, 2000.
(60) Provisional application No. 60/251,856, filed on Dec. 8, 2000.
(60) Provisional application No. 60/251,868, filed on Dec. 8, 2000.
(60) Provisional application No. 60/229,344, filed on Sep. 1, 2000.
(60) Provisional application No. 60/234,997, filed on Sep. 25, 2000.
(60) Provisional application No. 60/229,343, filed on Sep. 1, 2000.
(60) Provisional application No. 60/229,345, filed on Sep. 1, 2000.
(60) Provisional application No. 60/229,287, filed on Sep. 1, 2000.
(60) Provisional application No. 60/229,513, filed on Sep. 5, 2000.
(60) Provisional application No. 60/231,413, filed on Sep. 8, 2000.
(60) Provisional application No. 60/229,509, filed on Sep. 5, 2000.
(60) Provisional application No. 60/236,367, filed on Sep. 29, 2000.
(60) Provisional application No. 60/237,039, filed on Oct. 2, 2000.
(60) Provisional application No. 60/237,038, filed on Oct. 2, 2000.
(60) Provisional application No. 60/236,370, filed on Sep. 29, 2000.
(60) Provisional application No. 60/236,802, filed on Oct. 2, 2000.
(60) Provisional application No. 60/237,037, filed on Oct. 2, 2000.
(60) Provisional application No. 60/237,040, filed on Oct. 2, 2000.
(60) Provisional application No. 60/240,960, filed on Oct. 20, 2000.
(60) Provisional application No. 60/239,935, filed on Oct. 13, 2000.

(51) Int. Cl. C12Q 1/68; C07H 21/04; C12P 21/02; C12N 5/06

(52) U.S. Cl. 435/6; 435/69.1; 435/325; 435/320.1; 536/23.1

(57) ABSTRACT

The present invention relates to novel lung related polynucleotides and the polypeptides encoded by these polynucleotides herein collectively known as “lung antigens,” and the use of such lung antigens for detecting disorders of the lung, particularly the presence of lung cancer and lung cancer metastases. More specifically, isolated lung associated nucleic acid molecules are provided encoding novel lung associated polypeptides. Novel lung polypeptides and antibodies that bind to these polypeptides are provided. Also provided are vectors, host cells, and recombinant and synthetic methods for producing human lung associated polynucleotides and/or polypeptides. The invention further relates to diagnostic and therapeutic methods useful for diagnosing, treating, preventing and/or prognosing disorders related to the lung, including lung cancer, and therapeutic methods for treating such disorders. The invention further relates to screening methods for identifying agonists and antagonists of polynucleotides and polypeptides of the invention. The present invention further relates to methods and/or compositions for inhibiting the production and function of the polypeptides of the present invention.

### STATEMENT UNDER 37 C.F.R. § 1.77(b)(4)

[0001] This application refers to a “Sequence Listing” listed below, which is provided as an electronic document on two identical compact discs (CD-R), labeled “Copy 1” and “Copy 2.” These compact discs each contain the following files, which are hereby incorporated in their entirety herein:

| Document | File Name | Size in bytes | Date of Creation |
|---|---|---|---|
| Sequence Listing | PA121_seqList.txt | 1,364,706 | 01/12/2001 |
| V Viewer Setup File | SetupDLL.exe | 695,808 | 12/19/2000 |
| V Viewer Help File Controller | v.cnt | 7,984 | 01/05/2001 |
| V Viewer Program File | v.exe | 753,664 | 12/19/2000 |
| V Viewer Help File | v.hlp | 447,766 | 01/05/2001 |

[0002] The Sequence Listing may be viewed on an IBM-PC machine running the MS-Windows operating system by using the V viewer software, licensed by HGS, Inc., included on the compact discs (see World Wide Web URL: http://www.fileviewer.com).

### FIELD OF THE INVENTION

[0003] The present invention relates to novel lung related polynucleotides, the polypeptides encoded by these polynucleotides herein collectively referred to as “lung antigens,” and antibodies that immunospecifically bind these polypeptides, and the use of such lung polynucleotides, antigens, and antibodies for detecting, treating, preventing and/or prognosing disorders of the respiratory system, particularly disorders of the lung, including, but not limited to, the presence of lung cancer and lung cancer metastases. More specifically, isolated lung nucleic acid molecules are provided encoding novel lung polypeptides. Novel lung polypeptides and antibodies that bind to these polypeptides are provided. Also provided are vectors, host cells, and recombinant and synthetic methods for producing human lung polynucleotides, polypeptides, and/or antibodies. The invention further relates to diagnostic and therapeutic methods useful for diagnosing, treating, preventing and/or prognosing disorders related to the lung, including lung cancer, and therapeutic methods for treating such disorders. The invention further relates to screening methods for identifying agonists and antagonists of polynucleotides and polypeptides of the invention. The invention further relates to methods and/or compositions for inhibiting or promoting the production and/or function of the polypeptides of the invention.

### BACKGROUND OF THE INVENTION

[0004] The lung is a specialized organ whose primary functions are to transfer inhaled oxygen to the blood, and expel the waste product, carbon dioxide. Inhaled oxygen, which enters the body through the mouth and nose, is warmed, filtered, and passed through the nasal cavity into the lungs. The air enters the lungs and passes into the two main bronchi, each of which supplies one lung. The right and left main bronchi divide repeatedly into smaller and smaller branches (bronchioles) as they progress more deeply into the lungs. The bronchioles ultimately carry air to and from the clusters of air sacs (alveoli), where the exchange of oxygen and carbon dioxide takes place. The walls of the alveoli and of the surrounding capillaries are only one cell thick and are in very close contact with each other. Oxygen passes easily through the thin walls of the alveoli and into the blood in the capillaries, and carbon dioxide passes from the blood into the alveoli and is exhaled from the lung through the nose and mouth. Oxygenated blood travels from the lungs through the pulmonary veins and into the left side of the heart, which pumps the blood to the rest of the body. Oxygen-depleted, carbon dioxide-rich blood returns to the right side of the heart through two large veins, the superior and inferior vena cava, and is pumped through the pulmonary artery to the lungs, where it picks up oxygen and releases carbon dioxide.

[0005] Common lung disorders including infections, inflammations, and cancers. Disorders and diseases of the lung are described in more detail below.

[0006] Disease and Disorders of the Lung

[0007] Lung cancer (e.g., squamous cell carcinoma, small cell (oat cell) carcinoma, large cell carcinoma, and adenocarcinoma) is the most common form of cancer in the world. Typical diagnosis of lung cancer combines x-ray with sputum cytology. Unfortunately, by the time a patient seeks medical attention for their symptoms, the cancer has progressed to an advanced state, rendering it virtually incurable. Consequently, research has been focused on early detection of tumor markers before the cancer becomes clinically apparent and while the cancer is still localized and amenable to therapy. The World Health Organization has classified lung cancer into four major histological or morphological types: (1) squamous cell carcinoma, (2) eadenocarcinoma, (3) large cell carcinoma, and (4) small cell lung carcinoma. (World Health Organization. 1982. “The World Health Organization Histological Typing of Lung Tumors,” Am J Clin Pathol 77:123-136). Particular interest has been given to the identification of antigens associated with lung cancer. These antigens have been used in screening, diagnosis, clinical management, and potential treatment of lung cancer. However, there is a continuing need to identify specific antigens associated with lung cancer and to generate monoclonal antibodies (MAb) to these antigens for the development of tools for diagnosing cancer, targeting of drugs and other treatments to particular sites in the body, imaging of tumors for radiotherapy, and possible generating therapeutic agents for cancer. Despite all of the advances made in the area of lung cancer, medical and surgical intervention has resulted in little change in the 5-year survival rate for lung cancer patients. Early detection holds the greatest hope for successful intervention. There remains a need for a practical method to diagnose lung cancer as close to its inception as possible. In order for early detection to be feasible, it is important that specific markers are found and their sequences elucidated.

[0008] The lungs are particularly prone to allergic reactions because they're exposed to large quantities of airborne antigens, including dusts, pollens, and chemicals. Classification of allergic reactions is based on the type of tissue damage that occurs. Many allergic reactions are a mixture of more than one type of tissue damage. Some allergic reactions involve antigen-specific lymphocytes (a type of white blood cell) rather than antibodies. Allergic disorders may include eosinophilic pneumonia, hypersensitivity pneumonitis (e.g., extrinsic allergic alveolitis, allergic interstitial pneumonitis, organic dust pneumoconiosis, allergic bronchopulmonary aspergillosis, asthma, Wegener's granulomatosis (granulomatous vasculitis), Goodpasture's syndrome)).

[0009] Pneumonia is an infection of the lungs that involves the small air sacs (alveoli) and the tissues around them. In the United States, about 2 million people develop pneumonia each year, and 40,000 to 70,000 of them die. Often, pneumonia is the final illness in people who have other serious, chronic diseases. It's the sixth most common cause of death overall, and the most common fatal infection acquired in hospitals.

[0010] Pneumonia can be caused by bacterial viral, and/or fungal infections. For example, bacterial causes of pneumonia include Streptococcus pneumoniae (pneumoncoccal pneumonia), Staphylococcus aureus (staphylococcal pneumonia), Gram-negative bacterial pneumonia (caused by, e.g., Klebsiella and Pseudomas spp.), Mycoplasma pneumoniae pneumonia, Hemophilus influenzae pneumonia, Legionella pneumophila (Legionnaires' disease), and Chlamydia psittaci (Psittacosis)). For example, viral pneumonias include influenza, chickenpox (varicella), bronchiolitis, polio (poliomyelitis), croup, respiratory syncytial viral infection, mumps, erythema infectiosum (fifth disease), roseola infantum, progressive rubella panencephalitis, german measles, and subacute sclerosing panencephalitis. For example, fungal pneumonias include Histoplasmosis, Coccidioidomycosis, Blastomycosis, and fungal infections in people with severely suppressed immune systems (e.g., cryptococcosis, caused by Cryptococcus neoformans; aspergillosis, caused by Aspergillus spp.; candidiasis, caused by Candida; and mucormycosis)), Pneumocystis carinii (pneumocystis pneumonia). Pneumonias also include atypical pneumonias (e.g., Mycoplasma and Chlamydia spp.), opportunistic infection pneumonia, nosocomial pneumonia, chemical pneumonitis, and aspiration pneumonia.

[0011] The pleura is a thin, transparent membrane that covers the lungs and also lines the inside of the chest wall. The surface that covers the lungs lies in close contact with the surface that lines the chest wall. Between the two thin flexible surfaces is a small amount of fluid that lubricates them as they slide smoothly over one another with each breath. Air, blood, fluid, or other material can get between the pleural surfaces, creating a space. If too much material accumulates, one or both lungs may not be able to expand normally with breathing, resulting in the collapse of a lung. Pleurisy is an inflammation of the pleura. Pleurisy develops when an agent (usually a virus or bacterium) irritates the pleura, resulting in inflammation. Fluid may accumulate in the pleural space (a condition called pleural effusion), or fluid may not accumulate (a condition called dry pleurisy). After the inflammation subsides, the pleura may return to normal, or adhesions may form that make the pleural layers stick together. Pleural disorders may include, for example, pleurisy, pleural effusion, and pneumothorax (e.g., simple spontaneous pneumothorax, complicated spontaneous pneumothorax, tension pneumothorax)).

[0012] Cystic fibrosis is a hereditary disease that causes certain glands to produce abnormal secretions, resulting in several symptoms, the most important of which affect the digestive tract and the lungs. Cystic fibrosis is the most common inherited disease leading to death among white people in the United States. It occurs in 1 of every 2,500 white babies and in 1 of every 17,000 black babies. Many people with cystic fibrosis die young, but 35 percent of Americans with cystic fibrosis reach adulthood. Cystic fibrosis affects nearly all the exocrine glands, disrupting the regulation of the transfer of chloride and sodium (salt) across cell membranes. In people with cystic fibrosis mucus-producing glands in the airways of the lungs produce abnormal secretions that clog the airways and allow bacteria to multiply. The secretions are abnormal in different ways, and they affect gland function. In some glands, such as the pancreas and those in the intestines, the secretions are thick or solid and may block the gland completely. The sweat glands, parotid glands, and small salivary glands secrete fluids containing more salt than normal. Many people with CF require frequent hospitalizations and continuous use of antibiotics, enzyme supplements, and other medications.

[0013] Despite progress in therapy, cystic fibrosis remains a lethal disease, and no current therapy treats the basic defect. Since the most life threatening manifestations of CF involve pulmonary complications, epithelial cells of the upper airways are appropriate target cells for therapy.

[0014] Asthma is a condition in which the airways are narrowed because hyperreactivity to certain stimuli produces inflammation; the airway narrowing is reversible. Asthma affects about 10 million Americans and is becoming more common. In a person with asthma, the airways narrow in response to stimuli that don't affect the airways in normal lungs. The narrowing can be triggered by many stimuli, such as pollens, dust mites, animal dander, smoke, cold air, and exercise. In an asthma attack, the smooth muscles of the bronchi go into spasm, and the tissues lining the airways swell from inflammation and secrete mucus into the airways. These actions narrow the diameter of the airways (a condition called bronchoconstriction); the narrowing requires the person to exert more effort to move air in and out. Certain cells in the airway, particularly the mast cells, are thought to be responsible for initiating the airway narrowing. Mast cells throughout the bronchi release substances such as histamine and leukotrienes that cause smooth muscle to contract, mucus secretion to increase, and certain white blood cells to migrate to the area. Mast cells can be triggered to release these substances in response to something they recognize as foreign (an allergen), such as pollen, house dust mites, or animal dander. However, asthma is also common and severe in many people without defined allergies. Stress and anxiety also can trigger mast cells to release histamine and leukotrienes. Eosinophils, another type of cell found in the airways of people with asthma, release additional substances including leukotrienes and other materials, contributing to airway narrowing.

[0015] Obstructive airway diseases include, for example, asthma, chronic obstructive pulmonary disease (COPD), emphysema, chronic or acute bronchitis), occupational lung diseases (e.g., silicosis, black lung (coal workers' pneumoconiosis), asbestosis, berylliosis, occupational asthsma, byssinosis, and benign pneumoconioses), Infiltrative Lung Disease (e.g., pulmonary fibrosis (e.g., fibrosing alveolitis, usual interstitial pneumonia), idiopathic pulmonary fibrosis, desquamative interstitial pneumonia, and lymphoid interstitial pneumonia.

[0016] Histiocytosis X is a group of disorders (Letterer-Siwe disease, Hand-Schüller-Christian disease, eosinophilic granuloma) in which abnormal scavenger cells called histiocytes and another immune system cell type called eosinophils proliferate, especially in the bone and lung, often causing scars to form. Letterer-Siwe disease starts before age 3 and is usually fatal without treatment. The histiocytes damage not only the lungs but also the skin, lymph glands, bone, liver, and spleen. Collapse of a lung (pneumothorax) may occur. Hand-Schëller-Christian disease usually begins in early childhood but can start in late middle age. The lungs and bones are most frequently affected. Rarely, damage to the pituitary gland causes bulging eyes (exophthalmos) and diabetes insipidus, a condition in which large quantities of urine are produced, leading to dehydration. Eosinophilic granuloma tends to start between ages 20 and 40. It usually affects the bones but also affects the lungs in 20 percent of people; sometimes only the lungs are involved. When the lungs are affected, the symptoms can include coughing, shortness of breath, fever, and weight loss, but some people have no symptoms. Collapse of a lung (pneumothorax) is a common complication. People with Hand-Schüller-Christian disease or eosinophilic granuloma may recover spontaneously. All three disorders may be treated with corticosteroids and cytotoxic drugs such as cyclophosphamide, although no therapy is clearly beneficial. The therapy for bone involvement is similar to that for bone tumors. Death usually results from respiratory failure or heart failure.

[0017] Sarcoidosis is a disease in which abnormal collections of inflammatory cells (granulomas) form in many organs of the body. Pulmonary alveolar proteinosis is a rare disease in which the air sacs of the lungs (alveoli) become plugged with a protein-rich fluid. Idiopathic pulmonary hemosiderosis (iron in the lungs) is a rare, often fatal, disease in which blood leaks from the capillaries into the lungs for unknown reasons.

[0018] Disease and disorders of the lung also include, but are not limited to, Acute respiratory distress syndrome (also called, e.g., adult respiratory distress syndrome), edema, pulmonary embolism, bronchitis (e.g., viral, bacterial), bronchiectasis, atelectasis, and lung abscess (caused by, e.g., Staphylococcus aureus or Legionella pneumophila).

[0019] The discovery of new human lung associated polynucleotides, the polypeptides encoded by them, and antibodies that immunospecifically bind these polypeptides, satisfies a need in the art by providing new compositions which are useful in the diagnosis, treatment, prevention and/or prognosis of disorders of respiratory system, particularly disorders of the lung, including, but not limited to, allergic disorders (eosinophilic pneumonia, hypersensitivity pneumonitis (e.g., extrinsic allergic alveolitis, allergic interstitial pneumonitis, organic dust pneumoconiosis), asthma), pneumonia (e.g., bacterial, viral, fungal, atypical, and opportunistic infection), pleural disorders (e.g., pleurisy, pleural effusion, and pneumothorax), obstructive airway diseases (e.g., asthma, chronic obstructive pulmonary disease (COPD), emphysema, chronic or acute bronchitis), occupational lung diseases (e.g., silicosis, black lung, occupational asthsma, byssinosis, and benign pneumoconioses), infiltrative lung disease (e.g., pulmonary fibrosis, idiopathic pulmonary fibrosis, and desquamative interstitial pneumonia), histiocytosis X, sarcoidosis and pulmonary alveolar proteinosis), acute respiratory distress syndrome (also called, e.g., adult respiratory distress syndrome), edema, pulmonary embolism, bronchitis (e.g., viral, bacterial), bronchiectasis, atelectasis, lung abscess, cystic fibrosis, neoplasms and/or cancers of the lung, including, but not limited to, squamous cell carcinoma, small cell (oat cell) carcinoma, large cell carcinoma, and adenocarcinoma, and/or those disorders associated with the lung as described under “Respiratory Disorders” below.

### SUMMARY OF THE INVENTION

[0020] The present invention relates to novel lung related polynucleotides, the polypeptides encoded by these polynucleotides herein collectively referred to as “lung antigens,” and antibodies that immunospecifically bind these polypeptides, and the use of such lung polynucleotides, antigens, and antibodies for detecting, treating, preventing and/or prognosing disorders of the lung, including, but not limited to, the presence of lung cancer and lung cancer metastases. More specifically, isolated lung nucleic acid molecules are provided encoding novel lung polypeptides. Novel lung polypeptides and antibodies that bind to these polypeptides are provided. Also provided are vectors, host cells, and recombinant and synthetic methods for producing human lung polynucleotides, polypeptides, and/or antibodies. The invention further relates to diagnostic and therapeutic methods useful for diagnosing, treating, preventing and/or prognosing disorders related to the lung, including lung cancer, and therapeutic methods for treating such disorders. The invention further relates to screening methods for identifying agonists and antagonists of polynucleotides and polypeptides of the invention. The invention further relates to methods and/or compositions for inhibiting or promoting the production and/or function of the polypeptides of the invention.

### DETAILED DESCRIPTION

[0021] Tables

[0022] Table 1A summarizes some of the polynucleotides encompassed by the invention (including cDNA clones related to the sequences (Clone ID NO:Z), contig sequences (contig identifier (Contig ID:) and contig nucleotide sequence identifier (SEQ ID NO:X)) and further summarizes certain characteristics of these polynucleotides and the polypeptides encoded thereby. The first column provides a unique clone identifier, “Clone ID NO:Z”, for a cDNA plasmid related to each lung associated contig sequence disclosed in Table 1A. The second column provides a unique contig identifier, “Contig ID:” for each of the contig sequences disclosed in Table 1A. The third column provides the sequence identifier, “SEQ ID NO:X”, for each of the contig polynucleotide sequences disclosed in Table 1A. The fourth column, “ORF (From-To)”, provides the location (i.e., nucleotide position numbers) within the polynucleotide sequence of SEQ ID NO:X that delineate the preferred open reading frame (ORF) shown in the sequence listing and referenced in Table 1A as SEQ ID NO:Y (column 5). Column 6 lists residues comprising predicted epitopes contained in the polypeptides encoded by each of the preferred ORFs (SEQ ID NO:Y). Identification of potential immunogenic regions was performed according to the method of Jameson and Wolf (CABIOS, 4:181-186 (1988)); specifically, the Genetics Computer Group (GCG) implementation of this algorithm, embodied in the program PEPTIDESTRUCTURE (Wisconsin Package v10.0, Genetics Computer Group (GCG), Madison, Wis.). This method returns a measure of the probability that a given residue is found on the surface of the protein. Regions where the antigenic index score is greater than 0.9 over at least 6 amino acids are indicated in Table 1A as “Predicted Epitopes.” In particular embodiments, lung associated polypeptides of the invention comprise, or alternatively consist of, one, two, three, four, five or more of the predicted epitopes described in Table 1A. It will be appreciated that depending on the analytical criteria used to predict antigenic determinants, the exact address of the determinant may vary slightly. Column 7, “Tissue Distribution” shows the expression profile of tissue, cells, and/or cell line libraries which express the polynucleotides of the invention. The first number in column 7 (preceding the colon), represents the tissue/cell source identifier code corresponding to the code and description provided in Table 4. Expression of these polynucleotides was not observed in the other tissues and/or cell libraries tested. For those identifier codes in which the first two letters are not “AR”, the second number in column 7 (following the colon), represents the number of times a sequence corresponding to the reference polynucleotide sequence (e.g., SEQ ID NO:X) was identified in the tissue/cell source. Those tissue/cell source identifier codes in which the first two letters are “AR” designate information generated using DNA array technology. Utilizing this technology, cDNAs were amplified by PCR and then transferred, in duplicate, onto the array. Gene expression was assayed through hybridization of first strand cDNA probes to the DNA array. cDNA probes were generated from total RNA extracted from a variety of different tissues and cell lines. Probe synthesis was performed in the presence of ³³P dCTP, using oligo(dT) to prime reverse transcription. After hybridization, high stringency washing conditions were employed to remove non-specific hybrids from the array. The remaining signal, emanating from each gene target, was measured using a Phosphorimager. Gene expression was reported as Phosphor Stimulating Luminescence (PSL) which reflects the level of phosphor signal generated from the probe hybridized to each of the gene targets represented on the array. A local background signal subtraction was performed before the total signal generated from each array was used to normalize gene expression between the different hybridizations. The value presented after “[array code]:” represents the mean of the duplicate values, following background subtraction and probe normalization. One of skill in the art could routinely use this information to identify normal and/or diseased tissue(s) which show a predominant expression pattern of the corresponding polynucleotide of the invention or to identify polynucleotides which show predominant and/or specific tissue and/or cell expression. Column 8, “Cytologic Band,” provides the chromosomal location of polynucleotides corresponding to SEQ ID NO:X. Chromosomal location was determined by finding exact matches to EST and cDNA sequences contained in the NCBI (National Center for Biotechnology Information) UniGene database. Given a presumptive chromosomal location, disease locus association was determined by comparison with the Morbid Map, derived from Online Mendelian Inheritance in Man (Online Mendelian Inheritance in Man, OMIM™. McKusick-Nathans Institute for Genetic Medicine, Johns Hopkins University (Baltimore, Md.) and National Center for Biotechnology Information, National Library of Medicine (Bethesda, Md.) 2000. World Wide Web URL: http://www.ncbi.nlm.nih.gov/omim/). If the putative chromosomal location of the Query overlapped with the chromosomal location of a Morbid Map entry, an OMIM identification number is provided in column 9 labeled “OMIM Disease Reference(s)”. A key to the OMIM reference identification numbers is provided in Table 5.

[0023] Table 1B summarizes additional polynucleotides encompassed by the invention (including cDNA clones related to the sequences (Clone ID NO:Z), contig sequences (contig identifier (Contig ID:) contig nucleotide sequence identifiers (SEQ ID NO:X)), and genomic sequences (SEQ ID NO:B). The first column provides a unique clone identifier, “Clone ID NO:Z”, for a cDNA clone related to each contig sequence. The second column provides the sequence identifier, “SEQ ID NO:X”, for each contig sequence. The third column provides a unique contig identifier, “Contig ID:” for each contig sequence. The fourth column, provides a BAC identifier “BAC ID NO:A” for the BAC clone referenced in the corresponding row of the table. The fifth column provides the nucleotide sequence identifier, “SEQ ID NO:B” for a fragment of the BAC clone identified in column four of the corresponding row of the table. The sixth column, “Exon From-To”, provides the location (i.e., nucleotide position numbers) within the polynucleotide sequence of SEQ ID NO:B which delineate certain polynucleotides of the invention that are also exemplary members of polynucleotide sequences that encode polypeptides of the invention (e.g., polypeptides containing amino acid sequences encoded by the polynucleotide sequences delineated in column six, and fragments and variants thereof).

[0024] Table 2 summarizes homology and features of some of the polypeptides of the invention. The first column provides a unique clone identifier, “Clone ID NO:Z”, corresponding to a cDNA disclosed in Table 1A. The second column provides the unique contig identifier, “Contig ID:” corresponding to contigs in Table 1A and allowing for correlation with the information in Table 1A. The third column provides the sequence identifier, “SEQ ID NO:X”, for the contig polynucleotide sequences. The fourth column provides the analysis method by which the homology/identity disclosed in the row was determined. Comparisons were made between polypeptides encoded by the polynucleotides of the invention and either a non-redundant protein database (herein referred to as “NR”), or a database of protein families (herein referred to as “PFAM”) as further described below. The fifth column provides a description of PFAM/NR hits having significant matches to a polypeptide of the invention. Column six provides the accession number of the PFAM/NR hit disclosed in the fifth column. Column seven, “Score/Percent Identity”, provides a quality score or the percent identity, of the hit disclosed in column five. Columns 8 and 9, “NT From” and “NT To” respectively, delineate the polynucleotides in “SEQ ID NO:X” that encode a polypeptide having a significant match to the PFAM/NR database as disclosed in the fifth column. In specific embodiments, polypeptides of the invention comprise, or alternatively consist of, an amino acid sequence encoded by the polynucleotides in SEQ ID NO:X as delineated in columns 8 and 9, or fragments or variants thereof.

[0025] Table 3 provides polynucleotide sequences that may be disclaimed according to certain embodiments of the invention. The first column provides a unique clone identifier, “Clone ID NO:Z”, for a cDNA clone related to lung associated contig sequences disclosed in Table 1A. The second column provides the sequence identifier, “SEQ ID NO:X”, for contig polynucleotide sequences disclosed in Table 1A. The third column provides the unique contig identifier, “Contig ID”, for contigs disclosed in Table 1A. The fourth column provides a unique integer ‘a’ where ‘a’ is any integer between 1 and the final nucleotide minus 15 of SEQ ID NO:X, represented as “Range of a”, and the fifth column provides a unique integer ‘b’ where ‘b’ is any integer between 15 and the final nucleotide of SEQ ID NO:X, represented as “Range of b”, where both a and b correspond to the positions of nucleotide residues shown in SEQ ID NO:X, and where b is greater than or equal to a+14. For each of the polynucleotides shown as SEQ ID NO:X, the uniquely defined integers can be substituted into the general formula of a-b, and used to describe polynucleotides which may be preferably excluded from the invention. In certain embodiments, preferably excluded from the polynucleotides of the invention (including polynucleotide fragments and variants as described herein and diagnostic and/or therapeutic uses based on these polynucleotides) are at least one, two, three, four, five, ten, or more of the polynucleotide sequence(s) having the accession number(s) disclosed in the sixth column of this Table (including for example, published sequence in connection with a particular BAC clone). In further embodiments, preferably excluded from the invention are the specific polynucleotide sequence(s) contained in the clones corresponding to at least one, two, three, four, five, ten, or more of the available material having the accession numbers identified in the sixth column of this Table (including for example, the actual sequence contained in an identified BAC clone).

[0026] Table 4 provides a key to the tissue/cell source identifier code disclosed in Table 1A, column 7. Column 1 provides the key to the tissue/cell source identifier code disclosed in Table 1A, Column 7. Columns 2-5 provide a description of the tissue or cell source. Codes corresponding to diseased tissues are indicated in column 6 with the word “disease”. The use of the word “disease” in column 6 is non-limiting. The tissue or cell source may be specific (e.g. a neoplasm), or may be disease-associated (e.g., a tissue sample from a normal portion of a diseased organ). Furthermore, tissues and/or cells lacking the “disease” designation may still be derived from sources directly or indirectly involved in a disease state or disorder, and therefore may have a further utility in that disease state or disorder. In numerous cases where the tissue/cell source is a library, column 7 identifies the vector used to generate the library.

[0027] Table 5 provides a key to the OMIM™ reference identification numbers disclosed in Table 1A, column 9. OMIM reference identification numbers (Column 1) were derived from Online Mendelian Inheritance in Man (Online Mendelian Inheritance in Man, OMIM™. McKusick-Nathans Institute for Genetic Medicine, Johns Hopkins University (Baltimore, Md.) and National Center for Biotechnology Information, National Library of Medicine, (Bethesda, Md.) 2000. World Wide Web URL: http://www.ncbi.nlm.nih.gov/omim/). Column 2 provides diseases associated with the cytologic band disclosed in Table 1A, column 8, as determined from the Morbid Map database.

[0028] Table 6 summarizes ATCC Deposits, Deposit dates, and ATCC designation numbers of deposits made with the ATCC in connection with the present application.

[0029] Table 7 shows the cDNA libraries sequenced, tissue source description, vector information and ATCC designation numbers relating to these cDNA libraries.

[0030] Table 8 provides a physical characterization of clones encompassed by the invention. The first column provides the unique clone identifier, “Clone ID NO:Z”, certain cDNA clones of the invention, as described in Table 1A. The second column provides the size of the cDNA insert contained in the corresponding cDNA clone.

[0031] Definitions

[0032] The following definitions are provided to facilitate understanding of certain terms used throughout this specification.

[0033] In the present invention, “isolated” refers to material removed from its original environment (e.g., the natural environment if it is naturally occurring), and thus is altered “by the hand of man” from its natural state. For example, an isolated polynucleotide could be part of a vector or a composition of matter, or could be contained within a cell, and still be “isolated” because that vector, composition of matter, or particular cell is not the original environment of the polynucleotide. The term “isolated” does not refer to genomic or cDNA libraries, whole cell total or mRNA preparations, genomic DNA preparations (including those separated by electrophoresis and transferred onto blots), sheared whole cell genomic DNA preparations or other compositions where the art demonstrates no distinguishing features of the polynucleotide sequences of the present invention.

[0034] As used herein, a “polynucleotide” refers to a molecule having a nucleic acid sequence encoding SEQ ID NO:Y or a fragment or variant thereof; a nucleic acid sequence contained in SEQ ID NO:X (as described in column 3 of Table 1A) or the complement thereof; a cDNA sequence contained in Clone ID NO:Z (as described in column 1 of Table 1A and contained within a library deposited with the ATCC); a nucleotide sequence encoding the polypeptide encoded by a nucleotide sequence in SEQ ID NO:B as defined in column 6 of Table 1B or a fragment or variant thereof; or a nucleotide coding sequence in SEQ ID NO:B as defined in column 6 of Table 1B or the complement thereof. For example, the polynucleotide can contain the nucleotide sequence of the full length cDNA sequence, including the 5′ and 3′ untranslated sequences, the coding region, as well as fragments, epitopes, domains, and variants of the nucleic acid sequence. Moreover, as used herein, a “polypeptide” refers to a molecule having an amino acid sequence encoded by a polynucleotide of the invention as broadly defined (obviously excluding poly-Phenylalanine or poly-Lysine peptide sequences which result from translation of a polyA tail of a sequence corresponding to a cDNA).

[0035] As used herein, a “lung antigen” refers collectively to any polynucleotide disclosed herein (e.g., a nucleic acid sequence contained in SEQ ID NO:X or the complement therof, or cDNA sequence contained in Clone ID NO:Z, or a nucleotide sequence encoding the polypeptide encoded by a nucleotide sequence in SEQ ID NO:B as defined in column 6 of Table 1B, or a nucleotide coding sequence in SEQ ID NO:B as defined in column 6 of Table 1B or the complement thereof and fragments or variants thereof as described herein) or any polypeptide disclosed herein (e.g., an amino acid sequence contained in SEQ ID NO:Y, an amino acid sequence encoded by SEQ ID NO:X, or the complement thereof, an amino acid sequence encoded by the cDNA sequence contained in Clone ID NO:Z, an amino acid sequence encoded by SEQ ID NO:B, or the complement thereof, and fragments or variants thereof as described herein). These lung antigens have been determined to be predominantly expressed in lung tissues, including normal or diseased tissues (as shown in Table 1A column 7 and Table 4).

[0036] In the present invention, “SEQ ID NO:X” was often generated by overlapping sequences contained in multiple clones (contig analysis). A representative clone containing all or most of the sequence for SEQ ID NO:X is deposited at Human Genome Sciences, Inc. (HGS) in a catalogued and archived library. As shown, for example, in column 1 of Table 1A, each clone is identified by a cDNA Clone ID (identifier generally referred to herein as Clone ID NO:Z). Each Clone ID is unique to an individual clone and the Clone ID is all the information needed to retrieve a given clone from the HGS library. Furthermore, certain clones disclosed in this application have been deposited with the ATCC on Oct. 5, 2000, having the ATCC designation numbers PTA 2574 and PTA 2575; and on Jan. 5, 2001, having the depositor reference numbers TS-1, TS-2, AC-1, and AC-2. In addition to the individual cDNA clone deposits, most of the cDNA libraries from which the clones were derived were deposited at the American Type Culture Collection (hereinafter “ATCC”). Table 7 provides a list of the deposited cDNA libraries. One can use the Clone ID NO:Z to determine the library source by reference to Tables 6 and 7. Table 7 lists the deposited cDNA libraries by name and links each library to an ATCC Deposit. Library names contain four characters, for example, “HTWE.” The name of a cDNA clone (Clone ID NO:Z) isolated from that library begins with the same four characters, for example “HTWEP07”. As mentioned below, Table 1A correlates the Clone ID NO:Z names with SEQ ID NO:X. Thus, starting with an SEQ ID NO:X, one can use Tables 1, 6 and 7 to determine the corresponding Clone ID NO:Z, which library it came from and which ATCC deposit the library is contained in. Furthermore, it is possible to retrieve a given cDNA clone from the source library by techniques known in the art and described elsewhere herein. The ATCC is located at 10801 University Boulevard, Manassas, Va. 20110-2209, USA. The ATCC deposits were made pursuant to the terms of the Budapest Treaty on the international recognition of the deposit of microorganisms for the purposes of patent procedure.

[0037] In specific embodiments, the polynucleotides of the invention are at least 15, at least 30, at least 50, at least 100, at least 125, at least 500, or at least 1000 continuous nucleotides but are less than or equal to 300 kb, 200 kb, 100 kb, 50 kb, 15 kb, 10 kb, 7.5 kb, 5 kb, 2.5 kb, 2.0 kb, or 1 kb, in length. In a further embodiment, polynucleotides of the invention comprise a portion of the coding sequences, as disclosed herein, but do not comprise all or a portion of any intron. In another embodiment, the polynucleotides comprising coding sequences do not contain coding sequences of a genomic flanking gene (i.e., 5′ or 3′ to the gene of interest in the genome). In other embodiments, the polynucleotides of the invention do not contain the coding sequence of more than 1000, 500, 250, 100, 50, 25, 20, 15, 10, 5, 4, 3, 2, or 1 genomic flanking gene(s).

[0038] A “polynucleotide” of the present invention also includes those polynucleotides capable of hybridizing, under stringent hybridization conditions, to sequences contained in SEQ ID NO:X, or the complement thereof (e.g., the complement of any one, two, three, four, or more of the polynucleotide fragments described herein), the polynucleotide sequence delineated in columns 8 and 9 of Table 2 or the complement thereof, and/or cDNA sequences contained in Clone ID NO:Z (e.g., the complement of any one, two, three, four, or more of the polynucleotide fragments, or the cDNA clone within the pool of cDNA clones deposited with the ATCC, described herein) and/or the polynucleotide sequence delineated in column 6 of Table 1B or the complement thereof. “Stringent hybridization conditions” refers to an overnight incubation at 42 degree C. in a solution comprising 50% formamide, 5× SSC (750 mM NaCl, 75 mM trisodium citrate), 50 mM sodium phosphate (pH 7.6), 5× Denhardt's solution, 10% dextran sulfate, and 20 μg/ml denatured, sheared salmon sperm DNA, followed by washing the filters in 0.1× SSC at about 65 degree C.

[0039] Also contemplated are nucleic acid molecules that hybridize to the polynucleotides of the present invention at lower stringency hybridization conditions. Changes in the stringency of hybridization and signal detection are primarily accomplished through the manipulation of formamide concentration (lower percentages of formamide result in lowered stringency), salt conditions, or temperature. For example, lower stringency conditions include an overnight incubation at 37 degree C. in a solution comprising 6× SSPE (20× SSPE=3M NaCl; 0.2M NaH₂PO₄; 0.02M EDTA, pH 7.4), 0.5% SDS, 30% formamide, 100 ug/ml salmon sperm blocking DNA; followed by washes at 50 degree C. with 1×SSPE, 0.1% SDS. In addition, to achieve even lower stringency, washes performed following stringent hybridization can be done at higher salt concentrations (e.g. 5× SSC).

[0040] Note that variations in the above conditions may be accomplished through the inclusion and/or substitution of alternate blocking reagents used to suppress background in hybridization experiments. Typical blocking reagents include Denhardt's reagent, BLOTTO, heparin, denatured salmon sperm DNA, and commercially available proprietary formulations. The inclusion of specific blocking reagents may require modification of the hybridization conditions described above, due to problems with compatibility.

[0041] Of course, a polynucleotide which hybridizes only to polyA+ sequences (such as any 3′ terminal polyA+ tract of a cDNA shown in the sequence listing), or to a complementary stretch of T (or U) residues, would not be included in the definition of “polynucleotide,” since such a polynucleotide would hybridize to any nucleic acid molecule containing a poly (A) stretch or the complement thereof (e.g., practically any double-stranded cDNA clone generated using oligo dT as a primer).

[0042] The polynucleotide of the present invention can be composed of any polyribonucleotide or polydeoxribonucleotide, which may be unmodified RNA or DNA or modified RNA or DNA. For example, polynucleotides can be composed of single- and double-stranded DNA, DNA that is a mixture of single- and double-stranded regions, single- and double-stranded RNA, and RNA that is mixture of single- and double-stranded regions, hybrid molecules comprising DNA and RNA that may be single-stranded or, more typically, double-stranded or a mixture of single- and double-stranded regions. In addition, the polynucleotide can be composed of triple-stranded regions comprising RNA or DNA or both RNA and DNA. A polynucleotide may also contain one or more modified bases or DNA or RNA backbones modified for stability or for other reasons. “Modified” bases include, for example, tritylated bases and unusual bases such as inosine. A variety of modifications can be made to DNA and RNA; thus, “polynucleotide” embraces chemically, enzymatically, or metabolically modified forms.

[0043] The polypeptide of the present invention can be composed of amino acids joined to each other by peptide bonds or modified peptide bonds, i.e., peptide isosteres, and may contain amino acids other than the 20 gene-encoded amino acids. The polypeptides may be modified by either natural processes, such as posttranslational processing, or by chemical modification techniques which are well known in the art. Such modifications are well described in basic texts and in more detailed monographs, as well as in a voluminous research literature. Modifications can occur anywhere in a polypeptide, including the peptide backbone, the amino acid side-chains and the amino or carboxyl termini. It will be appreciated that the same type of modification may be present in the same or varying degrees at several sites in a given polypeptide. Also, a given polypeptide may contain many types of modifications. Polypeptides may be branched, for example, as a result of ubiquitination, and they may be cyclic, with or without branching. Cyclic, branched, and branched cyclic polypeptides may result from posttranslation natural processes or may be made by synthetic methods. Modifications include acetylation, acylation, ADP-ribosylation, amidation, covalent attachment of flavin, covalent attachment of a heme moiety, covalent attachment of a nucleotide or nucleotide derivative, covalent attachment of a lipid or lipid derivative, covalent attachment of phosphotidylinositol, cross-linking, cyclization, disulfide bond formation, demethylation, formation of covalent cross-links, formation of cysteine, formation of pyroglutamate, formylation, gamma-carboxylation, glycosylation, GPI anchor formation, hydroxylation, iodination, methylation, myristoylation, oxidation, pegylation, proteolytic processing, phosphorylation, prenylation, racemization, selenoylation, sulfation, transfer-RNA mediated addition of amino acids to proteins such as arginylation, and ubiquitination. (See, for instance, PROTEINS—STRUCTURE AND MOLECULAR PROPERTIES, 2nd Ed., T. E. Creighton, W. H. Freeman and Company, New York (1993); POSTTRANSLATIONAL COVALENT MODIFICATION OF PROTEINS, B. C. Johnson, Ed., Academic Press, New York, pgs. 1-12 (1983); Seifter et al., Meth. Enzymol. 182:626-646 (1990); Rattan et al., Ann. N.Y. Acad. Sci. 663:48-62 (1992).)

[0044] “SEQ ID NO:X” refers to a polynucleotide sequence described, for example, in Tables 1 or 2, while “SEQ ID NO:Y” refers to a polypeptide sequence described in column 5 of Table 1A. SEQ ID NO:X is identified by an integer specified in column 3 of Table 1A. The polypeptide sequence SEQ ID NO:Y is a translated open reading frame (ORF) encoded by polynucleotide SEQ ID NO:X. “Clone ID NO:Z” refers to a cDNA clone described in column 1 of Table 1A.

[0045] “A polypeptide having biological activity” refers to a polypeptide exhibiting activity similar to, but not necessarily identical to, an activity of a polypeptide of the present invention, including mature forms, as measured in a particular biological assay, with or without dose dependency. In the case where dose dependency does exist, it need not be identical to that of the polypeptide, but rather substantially similar to the dose-dependence in a given activity as compared to the polypeptide of the present invention (i.e., the candidate polypeptide will exhibit greater activity or not more than about 25-fold less and, preferably, not more than about tenfold less activity, and most preferably, not more than about three-fold less activity relative to the polypeptide of the present invention).

[0046] Table 1A summarizes some of the polynucleotides encompassed by the invention (including contig sequences (SEQ ID NO:X) and clones (Clone ID NO:Z) and further summarizes certain characteristics of these polynucleotides and the polypeptides encoded thereby.

[0047] Polynucleotides and Polypeptides

TABLE 1A

| | | | | AA | | Tissue Distribution | | |
|---|---|---|---|---|---|---|---|---|
| | | | | SEQ | | Library code: count | | OMIM |
| Clone ID | Contig | SEQ ID | ORF | ID | | (see Table IV for | Cytologic | Disease |
| NO: Z | ID: | NO: X | (From-To) | NO: Y | Predicted Epitopes | Library Codes) | Band | Reference(s): |
| HAPAC39 | 848724 | 11 | 10-312 | 103 | Trp-27 to Val-33, | H0042: 2 | | |
| | | | | | Arg-58 to Arg-63, | | | |
| | | | | | Lys-70 to Gln-75, | | | |
| | | | | | Gln-86 to Cys-93. | | | |
| HAPAM75 | 509745 | 12 | 1-111 | 104 | Asn-1 to Pro-8. | H0042: 2 | | |
| HAPBT59 | 739607 | 13 | 122-361 | 105 | Ser-7 to Ser-13, | H0042: 2 and L0600: | | |
| | | | | | Gly-23 to Gln-29, | 1. | | |
| | | | | | Pro-32 to Leu-39. | | | |
| HAPBU51 | 724824 | 14 | 81-236 | 106 | | H0042: 1 and H0575: | | |
| | | | | | | 1. | | |
| HAPBU55 | 732487 | 15 | 2-199 | 107 | | H0042: 1 and H0575: | | |
| | | | | | | 1. | | |
| HAPNM31 | 881916 | 16 | 2-427 | 108 | Lys-71 to Pro-77, | H0575: 2 and L0803: | | |
| | | | | | Ser-86 to Arg-92. | 1. | | |
| HAPNQ48 | 587302 | 17 | 97-315 | 109 | | H0575: 2 | | |
| HAPNR68 | 848699 | 18 | 130-357 | 110 | | H0575: 2 | | |
| HAPNZ11 | 966780 | 19 | 292-450 | 111 | | H0575: 2 | | |
| HAPOK85 | 848692 | 20 | 1-147 | 112 | | H0575: 2 | | |
| HAPON27 | 701741 | 21 | 2-157 | 113 | Ser-15 to Glu-23, | H0575: 2 | | |
| | | | | | Ser-32 to Glu-42. | | | |
| HAPOX59 | 587526 | 22 | 217-369 | 114 | Ser-1 to Cys-17, | H0575: 2 | | |
| | | | | | Ser-20 to Ala-27, | | | |
| | | | | | Leu-39 to Lys-51. | | | |
| HAPPX64 | 786559 | 23 | 2-439 | 115 | Thr-29 to Asn-37, | H0575: 2 | | |
| | | | | | Val-58 to Thr-63, | | | |
| | | | | | Glu-114 to Glu-120. | | | |
| HAPSG03 | 923690 | 24 | 198-443 | 116 | Arg-27 to Arg-33, | H0575: 3 and L0748: | | |
| | | | | | Ser-35 to Gln-40. | 1. | | |
| HAPSP70 | 720687 | 25 | 68-334 | 117 | Leu-21 to Lys-28. | H0042: 1 and H0575: | | |
| | | | | | 1. | | | |
| HAPSQ88 | 847529 | 26 | 85-396 | 118 | Pro-11 to Gln-21, | H0575: 2 | | |
| | | | | | Pro-26 to Arg-32, | | | |
| | | | | | Arg-71 to Pro-85. | | | |
| HAPSR74 | 952336 | 27 | 12-206 | 119 | | H0575: 2 | | |
| HAPSR91 | 789579 | 28 | 170-313 | 120 | Asp-30 to Gln-37. | H0575: 2 | | |
| HAPST65 | 864789 | 29 | 280-504 | 121 | Gln-8 to Ser-14. | H0575: 2 | | |
| HAPSU75 | 767111 | 30 | 1-291 | 122 | Ala-23 to Trp-33, | H0575: 2 | | |
| | | | | | Gly-75 to Ser-88. | | | |
| HAPTB92 | 791015 | 31 | 1-300 | 123 | | H0575: 2 and L0803: | | |
| | | | | | 1. | | | |
| HAPTL74 | 765047 | 32 | 129-344 | 124 | | H0575: 2 | | |
| HAPTM40 | 792192 | 33 | 52-381 | 125 | Cys-7 to Lys-15, | H0575: 2 | | |
| | | | | | Gln-25 to Gly-30, | | | |
| | | | | | Pro-57 to Trp-75, | | | |
| | | | | | Pro-92 to Pro-99. | | | |
| HAPUA68 | 954412 | 34 | 121-243 | 126 | | H0042: 1 and H0575: | | |
| | | | | | | 1. | | |
| HLJBD62 | 558975 | 35 | 2-433 | 127 | Pro-15 to Pro-24. | H0375: 2 | | |
| HLJBE19 | 953727 | 36 | 70-234 | 128 | | H0375: 2 | | |
| HLJDL84 | 782823 | 37 | 188-397 | 129 | Thr-32 to Glu-45. | H0375: 2 | | |
| HLJDZ49 | 923476 | 38 | 11-196 | 130 | Lys-36 to Ar-43. | H0375: 2 | | |
| HNLMB07 | 951944 | 39 | 1-204 | 131 | Ala-7 to Gly-12, | H0652: 1, L0523: 1 | | |
| | | | | | Gln-21 to Phe-26. | and L0756: 1. | | |
| HLJEB53 | 727924 | 40 | 220-474 | 132 | Asn-27 to Phe-37. | L0748: 9, H0375: 1 | | |
| | | | | | | and L0598: 1. | | |
| HLJDZ06 | 934837 | 41 | 274-441 | 133 | Trp-1 to Lys-7, | H0375: 1 and L0794: | | |
| | | | | | Pro-28 to Ser-33. | 1. | | |
| HLJDU56 | 853274 | 42 | 42-236 | 134 | Thr-34 to Thr-45, | L0754: 2, H0375: 1, | | |
| | | | | | Phe-59 to Tyr-65. | L0598: 1 and L0756: | | |
| | | | | | | 1. | | |
| HLJDO65 | 747587 | 43 | 62-328 | 135 | Leu-1 to Ser-9, | L0747: 2, L0777: 2 | | |
| | | | | | Cys-28 to Trp-35, | and H0375: 1. | | |
| | | | | | Asn-38 to Val-44, | | | |
| | | | | | Thr-78 to Glu-84. | | | |
| HLJDO57 | 734445 | 44 | 53-217 | 136 | Ser-18 to Thr-30. | H0375: 1 and L0757: | | |
| | | | | | | 1. | | |
| HLJDO10 | 856927 | 45 | 95-259 | 137 | Pro-16 to His-21. | R054: 24, AR051: | | |
| | | | | | | 24, AR050: 21 | | |
| | 963795 | 102 | 976-653 | 194 | | H0375: 1 | | |
| HLJDN60 | 740061 | 46 | 162-272 | 138 | Gly-3 to Asn-13. | H0375: 1 and L0754: | | |
| | | | | | | 1. | | |
| HLJBR43 | 948850 | 47 | 1-672 | 139 | Val-7 to Gly-14, | L0439: 2, H0375: 1 | | |
| | | | | | Leu-78 to Asp-83. | and L0758: 1. | | |
| HLJBE22 | 674819 | 48 | 524-685 | 140 | Lys-1 to Ser-6, | L0777: 2, H0375: 1, | | |
| | | | | | Asn-43 to Asn-48. | L0439: 1 and L0749: | | |
| | | | | | | 1. | | |
| HIDAG10 | 970518 | 49 | 3-149 | 141 | Thr-9 to Thr-21. | H0649: 1 and L0754: | | |
| | | | | | | 1. | | |
| HIDAF76 | 857563 | 50 | 386-607 | 142 | | H0649: 1, L0593: 1 | | |
| | | | | | | and L0595: 1. | | |
| HIDAE12 | 968936 | 51 | 486-680 | 143 | Ile-50 to Gly-56. | H0649: 1 | | |
| HIDAA03 | 922105 | 52 | 285-449 | 144 | His-4 to Glu-9, | H0649: 1 and L0387: | | |
| | | | | | Lys-37 to Asp-42. | 1. | | |
| HAPUA06 | 934457 | 53 | 3-428 | 145 | Thr-2 to Val-9, | H0575: 1 and L0439: | | |
| | | | | | Glu-24 to Glu-29. | 1. | | |
| HAPTU85 | 813245 | 54 | 2-205 | 146 | | L0731: 2 and H0575: | | |
| | | | | | | 1. | | |
| HAPTN70 | 756764 | 55 | 237-392 | 147 | | L0439: 2 and H0575: | | |
| | | | | | | 1. | | |
| HAPTK51 | 719671 | 56 | 66-188 | 148 | | H0575: 1 and L0757: | | |
| | | | | | | 1. | | |
| HAPTF84 | 782436 | 57 | 272-508 | 149 | Pro-1 to Cys-6, | H0575: 1 and L0748: | | |
| | | | | | Gln-29 to Gln-36, | 1. | | |
| | | | | | Lys-67 to Asn-72. | | | |
| HAPSY61 | 871280 | 58 | 285-488 | 150 | Lys-43 to Tyr-52. | L0771: 2 and H0575: | | |
| | | | | | | 1. | | |
| HAPSU60 | 743381 | 59 | 112-372 | 151 | Ala-28 to Lys-33, | H0575: 1 and L0777: | | |
| | | | | | Pro-66 to Gly-71, | 1. | | |
| | | | | | Pro-73 to Arg-85. | | | |
| HAPSN95 | 733638 | 60 | 31-381 | 152 | Gly-15 to Val-22, | L0745: 4 and H0575: | | |
| | | | | | Gly-31 to Asn-36, | 1. | | |
| | | | | | Ala-43 to Ser-75, | | | |
| | | | | | Thr-91 to Ser-111. | | | |
| HAPSL79 | 774352 | 61 | 280-621 | 153 | Pro-21 to Glu-29, | H0575: 1 and L0590: | | |
| | | | | | Met-53 to Gln-58, | 1. | | |
| | | | | | Lys-70 to Ser-81. | | | |
| HAPSL78 | 864795 | 62 | 87-278 | 154 | Pro-41 to Pro-46, | H0575: 1 and L0777: | | |
| | | | | | Thr-58 to Ala-63. | 1. | | |
| HAPSK65 | 747743 | 63 | 329-487 | 155 | | H0575: 1 and L0439: | | |
| | | | | | | 1. | | |
| HAPSI85 | 784168 | 64 | 2-460 | 156 | Arg-1 to Lys-15, | H0575: 1 | | |
| | | | | | Arg-26 to Asn-36, | | | |
| | | | | | Lys-75 to Lys-80. | | | |
| HAPSI44 | 716366 | 65 | 1-138 | 157 | Arg-3 to Leu-9, | L0764: 2, L0362: 2, | | |
| | | | | | Pro-12 to Leu-23, | H0575: 1, L0771: 1, | | |
| | | | | | Leu-27 to Asn-41. | L0517: 1, L0783: 1 | | |
| | | | | | | and L0752: 1. | | |
| HAPSC58 | 735503 | 66 | 47-316 | 158 | Glu-1 to Glu-7. | H0575: 1 and L0756: | | |
| | | | | | | 1. | | |
| HAPSC06 | 933285 | 67 | 1-132 | 159 | | H0575: 1 and L0748: | | |
| | | | | | | 1. | | |
| HAPSA17 | 662678 | 68 | 2-298 | 160 | Pro-28 to Asp-37, | H0575: 1 and L0731: | | |
| | | | | | Tyr-49 to Tyr-54, | 1. | | |
| | | | | | Ala-93 to Phe-99. | | | |
| HAPRM40 | 587668 | 69 | 1-384 | 161 | Leu-1 to Gly-12, | H0575: 1 and L0748: | | |
| | | | | | Glu-20 to Pro-27, | 1. | | |
| | | | | | Glu-34 to Gln-41, | | | |
| | | | | | Val-43 to Glu-48, | | | |
| | | | | | Ser-67 to Ala-72. | | | |
| HAPRJ45 | 758111 | 70 | 2-568 | 162 | Asp-1 to Glu-6, | H0575: 1 and L0439: | | |
| | | | | | Leu-42 to Lys-48. | 1. | | |
| HAPRG26 | 680612 | 71 | 2-373 | 163 | Glu-1 to Thr-6, | H0575: 1 | | |
| | | | | | Gly-32 to Cys-38, | | | |
| | | | | | Ser-40 to Cys-45, | | | |
| | | | | | Trp-56 to Pro-65. | | | |
| HAPRB02 | 919555 | 72 | 11-340 | 164 | Gln-1 to Pro-7, | L0754: 2, H0575 1 | 11q13 | 102200, |
| | | | | | Gln-29 to Tyr-34, | and L0761: 1. | | 106100, |
| | | | | | Ser-64 to Trp-72, | | | 131100, |
| | | | | | Ala-104 to Lys-110. | | | 131100, |
| | | | | | | | | 131100, |
| | | | | | | | | 133780, |
| | | | | | | | | 147050, |
| | | | | | | | | 153700, |
| | | | | | | | | 161015, |
| | | | | | | | | 164009, |
| | | | | | | | | 168461, |
| | | | | | | | | 168461, |
| | | | | | | | | 168461, |
| | | | | | | | | 180721, |
| | | | | | | | | 180840, |
| | | | | | | | | 191181, |
| | | | | | | | | 193235, |
| | | | | | | | | 209901, |
| | | | | | | | | 232600, |
| | | | | | | | | 259700, |
| | | | | | | | | 259770, |
| | | | | | | | | 600045, |
| | | | | | | | | 600319, |
| | | | | | | | | 600528, |
| | | | | | | | | 601884 |
| HAPQU75 | 570798 | 73 | 111-347 | 165 | Cys-1 to Thr-6, | AR051: 33, AR054: | | |
| | | | | | Gln-38 to Lys-51. | 24, AR050: 23 | | |
| | | | | | | H0575: 1 | | |
| HAPQQ45 | 587591 | 74 | 287-538 | 166 | His-15 to Cys-23, | L0747: 2, L0755: 2, | | |
| | | | | | Arg-50 to Trp-55, | H0575: 1, L0770: 1 | | |
| | | | | | His-58 to Asn-64, | and L0775: 1. | | |
| | | | | | Leu-73 to Gly-83. | | | |
| HAPQJ23 | 587566 | 75 | 115-609 | 167 | His-5 to Thr-17, | H0575: 1 | 1 | |
| | | | | | Phe-25 to Val-33, | | | |
| | | | | | Thr-40 to Leu-46, | | | |
| | | | | | Pro-48 to Ser-54, | | | |
| | | | | | Asn-69 to Gln-74, | | | |
| | | | | | Ala-95 to Asn-101, | | | |
| | | | | | Lys-123 to Cys-132. | | | |
| HAPPX24 | 739820 | 76 | 489-692 | 168 | | H0575: 1, L0439: 1, | | |
| | | | | | | L0752: 1 and L0599: | | |
| | | | | | | 1. | | |
| HAPPW61 | 801982 | 77 | 271-119 | 169 | Pro-14 to Ser-23. | H0575: 1, L0740: 1, | | |
| | | | | | | L0747: 1 and | | |
| | | | | | | L0596: 1. | | |
| HAPOW05 | 945202 | 78 | 8-331 | 170 | Lys-4 to Ser-12, | AR061: 14, AR089: | | |
| | | | | | Gln-22 to Leu-27, | 8 | | |
| | | | | | Val-31 to Arg-55. | L0748: 2 and H0575: | | |
| | | | | | | 1. | | |
| HAPOT58 | 951615 | 79 | 1-552 | 171 | | H0575: 1 and L0731: | | |
| | | | | | | 1. | | |
| HAPOT24 | 587516 | 80 | 177-305 | 172 | | H0575: 1 and L0740: | | |
| | | | | | | 1. | | |
| HAPOT10 | 964373 | 81 | 203-496 | 173 | Arg-29 to Gln-42, | H0575: 1, L0659: 1 | | |
| | | | | | Val-54 to Ile-70, | and L0777: 1. | | |
| | | | | | Lys-85 to Val-96. | | | |
| HAPOS73 | 587512 | 82 | 26-244 | 174 | Pro-1 to Gly-7, | H0575: 1 and L0740: | 2g12.1 | 123620, |
| | | | | | Pro-36 to Ser-42. | 1. | | 188826, |
| | | | | | | | | 600850, |
| | | | | | | | | 601669 |
| HAPON47 | 934577 | 83 | 277-651 | 175 | | H0575: 1 and L0756: | | |
| | | | | | | 1. | | |
| HAPOK94 | 964606 | 84 | 78-365 | 176 | Ala-1 to Pro-9, | H0575: 1 and L0757: | | |
| | | | | | Ala-54 to Lys-62. | 1. | | |
| HAPOI08 | 959128 | 85 | 331-600 | 177 | Phe-32 to Val-37, | L0742: 7, H0575: 1 | | |
| | | | | | Arg-45 to Ser-50, | and L0439: 1. | | |
| | | | | | Arg-56 to Pro-65. | | | |
| HAPOE54 | 859914 | 86 | 289-540 | 178 | | L0748: 2 and H0575: | | |
| | | | | | | 1. | | |
| HAPNY68 | 752906 | 87 | 95-355 | 179 | Pro-49 to Gln-59, | H0575: 1 and L0589: | | |
| | | | | | Arg-67 to Leu-74. | 1. | | |
| HAPNS86 | 587322 | 88 | 163-408 | 180 | | H0575: 1 and L0756: | | |
| | | | | | | 1. | | |
| HAPNR50 | 799776 | 89 | 1-243 | 181 | Asp-8 to Asn-13, | H0575: 1, L0438: 1 | | |
| | | | | | Glu-23 to Arg-30, | and L0439: 1. | | |
| | | | | | Pro-37 to Asn-43, | | | |
| | | | | | Cys-74 to Glu-81. | | | |
| HAPNN11 | 966797 | 90 | 2-193 | 182 | Pro-21 to Arg-44. | L0776: 2 and H0575: | | |
| | | | | | | 1. | | |
| HAPNM66 | 616165 | 91 | 2-487 | 183 | Met-4 to Gln-10. | H0575: 1, L0748: 1 | | |
| | | | | | | and L0754: 1. | | |
| HAPNK27 | 848723 | 92 | 2-247 | 184 | Lys-1 to Asp-13. | L0749: 2, H0575: 1, | | |
| | | | | | | L0740: 1 and L0593: | | |
| | | | | | | 1. | | |
| HAPNI71 | 587276 | 93 | 327-542 | 185 | Asn-16 to Cys-23. | H0575: 1, L0744: 1, | | |
| | | | | | | L0439: 1, L0754: 1 | | |
| | | | | | | and L0777: 1. | | |
| HAPNI63 | 744960 | 94 | 401-601 | 186 | Thr-14 to Gln-19, | H0575: 1 and L0743: | | |
| | | | | | Gln-50 to Lys-55. | 1. | | |
| HAPMF94 | 796830 | 95 | 327-476 | 187 | Ser-27 to Leu-38. | H0042: 1, L0748: 1 | | |
| | | | | | | and L0754: 1. | | |
| HAPBU05 | 932762 | 96 | 300-401 | 188 | | H0042: 1 and L0485: | | |
| | | | | | | 1. | | |
| HAPBR65 | 753903 | 97 | 416-667 | 189 | | L0596: 2 and H0042: | | |
| | | | | | | 1. | | |
| HAPBP83 | 714984 | 98 | 381-599 | 190 | His-11 to Asp-25. | L0766: 2, H0042: 1 | | |
| | | | | | | and L0731: 1. | | |
| HAPBP08 | 960299 | 99 | 303-476 | 191 | Gly-22 to Gly-30. | L0740: 3 and H0042: | | |
| | | | | | | 1. | | |
| HAPBH82 | 780233 | 100 | 1-315 | 192 | | H0042: 1 and L0748: | | |
| | | | | | | 1. | | |
| HAPAJ81 | 778553 | 101 | 311-568 | 193 | | H0042: 1, L0744: 1 | | |
| | | | | | | and L0740: 1. | | |

[0048] The first column in Table 1A provides a unique “Clone ID NO:Z” for a cDNA clone related to each contig sequence disclosed in Table 1A. This clone ID references the cDNA clone which contains at least the 5′ most sequence of the assembled contig, and at least a portion of SEQ ID NO:X was determined by directly sequencing the referenced clone. The reference clone may have more sequence than described in the sequence listing or the clone may have less. In the vast majority of cases, however, the clone is believed to encode a full-length polypeptide. In the case where a clone is not full-length, a full-length cDNA can be obtained by methods known in the art and/or as described elsewhere herein.

[0049] The second column in Table 1A provides a unique “Contig ID” identification for each contig sequence. The third column provides the “SEQ ID NO:X” identifier for each of the lung associated contig polynucleotide sequences disclosed in Table 1A. The fourth column, “ORF (From-To)”, provides the location (i.e., nucleotide position numbers) within the polynucleotide sequence “SEQ ID NO:X” that delineate the preferred open reading frame (ORF) shown in the sequence listing and referenced in Table 1A, column 5, as SEQ ID NO:Y. Where the nucleotide position number “To” is lower than the nucleotide position number “From”, the preferred ORF is the reverse complement of the referenced polynucleotide sequence.

[0050] The fifth column in Table 1A provides the corresponding SEQ ID NO:Y for the polypeptide sequence encoded by the preferred ORF delineated in column 4. In one embodiment, the invention provides an amino acid sequence comprising, or alternatively consisting of, a polypeptide encoded by the portion of SEQ ID NO:X delineated by “ORF (From-To)”. Also provided are polynucleotides encoding such amino acid sequences and the complementary strand thereto.

[0051] Column 6 in Table 1A lists residues comprising epitopes contained in the polypeptides encoded by the preferred ORF (SEQ ID NO:Y), as predicted using the algorithm of Jameson and Wolf, (1988) Comp. Appl. Biosci. 4:181-186. The Jameson-Wolf antigenic analysis was performed using the computer program PROTEAN (Version 3.11 for the Power MacIntosh, DNASTAR, Inc., 1228 South Park Street Madison, Wis.). In specific embodiments, polypeptides of the invention comprise, or alternatively consist of, at least one, two, three, four, five or more of the predicted epitopes as described in Table 1A. It will be appreciated that depending on the analytical criteria used to predict antigenic determinants, the exact address of the determinant may vary slightly.

[0052] Column 7 in Table 1A provides an expression profile and library code: count for each of the contig sequences (SEQ ID NO:X) disclosed in Table 1A, which can routinely be combined with the information provided in Table 4 and used to determine the normal or diseased tissues, cells, and/or cell line libraries which predominantly express the polynucleotides of the invention. The first number in column 7 (preceding the colon), represents the tissue/cell source identifier code corresponding to the code and description provided in Table 4. For those identifier codes in which the first two letters are not “AR”, the second number in column 7 (following the colon) represents the number of times a sequence corresponding to the reference polynucleotide sequence was identified in the tissue/cell source. Those tissue/cell source identifier codes in which the first two letters are “AR” designate information generated using DNA array technology. Utilizing this technology, cDNAs were amplified by PCR and then transferred, in duplicate, onto the array. Gene expression was assayed through hybridization of first strand cDNA probes to the DNA array. cDNA probes were generated from total RNA extracted from a variety of different tissues and cell lines. Probe synthesis was performed in the presence of ³³P dCTP, using oligo(dT) to prime reverse transcription. After hybridization, high stringency washing conditions were employed to remove non-specific hybrids from the array. The remaining signal, emanating from each gene target, was measured using a Phosphorimager. Gene expression was reported as Phosphor Stimulating Luminescence (PSL) which reflects the level of phosphor signal generated from the probe hybridized to each of the gene targets represented on the array. A local background signal subtraction was performed before the total signal generated from each array was used to normalize gene expression between the different hybridizations. The value presented after “[array code]:” represents the mean of the duplicate values, following background subtraction and probe normalization. One of skill in the art could routinely use this information to identify normal and/or diseased tissue(s) which show a predominant expression pattern of the corresponding polynucleotide of the invention or to identify polynucleotides which show predominant and/or specific tissue and/or cell expression. The sequences disclosed herein have been determined to be predominantly expressed in lung tissues, including normal and diseased lung tissues (See Table 1A, column 7 and Table 4).

[0053] Column 8 in Table 1A provides a chromosomal map location for certain polynucleotides of the invention. Chromosomal location was determined by finding exact matches to EST and cDNA sequences contained in the NCBI (National Center for Biotechnology Information) UniGene database. Each sequence in the UniGene database is assigned to a “cluster”; all of the ESTs, cDNAs, and STSs in a cluster are believed to be derived from a single gene. Chromosomal mapping data is often available for one or more sequence(s) in a UniGene cluster; this data (if consistent) is then applied to the cluster as a whole. Thus, it is possible to infer the chromosomal location of a new polynucleotide sequence by determining its identity with a mapped UniGene cluster.

[0054] A modified version of the computer program BLASTN (Altshul et al., J. Mol. Biol. 215:403-410 (1990), and Gish et al., Nat. Genet. 3:266-272 (1993)) was used to search the UniGene database for EST or cDNA sequences that contain exact or near-exact matches to a polynucleotide sequence of the invention (the ‘Query’). A sequence from the UniGene database (the ‘Subject’) was said to be an exact match if it contained a segment of 50 nucleotides in length such that 48 of those nucleotides were in the same order as found in the Query sequence. If all of the matches that met this criteria were in the same UniGene cluster, and mapping data was available for this cluster, it is indicated in Table 1A under the heading “Cytologic Band”. Where a cluster had been further localized to a distinct cytologic band, that band is disclosed; where no banding information was available, but the gene had been localized to a single chromosome, the chromosome is disclosed.

[0055] Once a presumptive chromosomal location was determined for a polynucleotide of the invention, an associated disease locus was identified by comparison with a database of diseases which have been experimentally associated with genetic loci. The database used was the Morbid Map, derived from OMIM™ (supra). If the putative chromosomal location of a polynucleotide of the invention (Query sequence) was associated with a disease in the Morbid Map database, an OMIM reference identification number was noted in column 9, Table 1A, labeled “OMIM Disease Reference(s)”. Table 5 is a key to the OMIM reference identification numbers (column 1), and provides a description of the associated disease in Column 2.

TABLE 1B

| | SEQ | | | | |
|---|---|---|---|---|---|
| | ID | | | | |
| Clone ID | NO: | CONTIG | | SEQ ID | EXON |
| NO: Z | X | ID: | BAC ID: A | NO: B | From-To |
| HAPAM75 | 12 | 509745 | AC019206 | 195 | 1-1051 |
| HAPAM75 | 12 | 509745 | AC019206 | 196 | 1-594 |
| HAPAM75 | 12 | 509745 | AC019206 | 197 | 1-399 |
| | | | | | 1938-2099 |
| | | | | | 2802-2892 |
| HAPBTS9 | 13 | 739607 | AC073841 | 198 | 1-346 |
| | | | | | 428-529 |
| | | | | | 861-1951 |
| HAPBT59 | 13 | 739607 | AC005236 | 199 | 1-162 |
| | | | | | 260-1231 |
| | | | | | 1279-1871 |
| | | | | | 1974-2378 |
| | | | | | 2405-5854 |
| | | | | | 5873-9206 |
| | | | | | 9265-9520 |
| | | | | | 10122-10580 |
| | | | | | 11216-12908 |
| | | | | | 13750-14152 |
| | | | | | 14225-14441 |
| | | | | | 14663-15748 |
| | | | | | 15849-16472 |
| HAPBT59 | 13 | 739607 | AC018720 | 200 | 1-503 |
| | | | | | 1388-1811 |
| | | | | | 2201-2430 |
| | | | | | 3053-3173 |
| | | | | | 3196-3637 |
| | | | | | 3726-4273 |
| | | | | | 4553-5344 |
| | | | | | 6142-6292 |
| | | | | | 6948-7370 |
| | | | | | 8715-8932 |
| | | | | | 9521-9770 |
| | | | | | 10279-10865 |
| | | | | | 10941-11179 |
| | | | | | 11407-11789 |
| | | | | | 12003-12640 |
| | | | | | 12651-13102 |
| | | | | | 13214-13638 |
| | | | | | 13977-14246 |
| | | | | | 14402-14560 |
| | | | | | 15310-16158 |
| | | | | | 16665-16795 |
| | | | | | 17578-17919 |
| | | | | | 18148-18258 |
| | | | | | 18376-18538 |
| | | | | | 18636-19607 |
| | | | | | 19655-20247 |
| | | | | | 20351-20755 |
| | | | | | 20780-27528 |
| | | | | | 27589-27845 |
| | | | | | 28447-28852 |
| | | | | | 29543-31243 |
| | | | | | 32087-32488 |
| | | | | | 32562-32778 |
| | | | | | 33000-34086 |
| | | | | | 34397-34488 |
| HAPBT59 | 13 | 739607 | AC006014 | 201 | 1-64 |
| | | | | | 146-649 |
| | | | | | 860-1482 |
| | | | | | 1544-1967 |
| | | | | | 2179-2586 |
| | | | | | 3209-3329 |
| | | | | | 3352-3796 |
| | | | | | 3885-4432 |
| | | | | | 4712-5503 |
| | | | | | 6303-6453 |
| | | | | | 7115-7537 |
| | | | | | 8882-9099 |
| | | | | | 9688-9937 |
| | | | | | 10446-11032 |
| | | | | | 11108-11346 |
| | | | | | 11574-11956 |
| | | | | | 12170-12807 |
| | | | | | 12818-13269 |
| | | | | | 13381-13805 |
| | | | | | 14144-14413 |
| | | | | | 14569-14727 |
| | | | | | 15479-16327 |
| | | | | | 16834-16964 |
| | | | | | 17741-18082 |
| | | | | | 18315-18425 |
| | | | | | 18543-18705 |
| | | | | | 18803-19774 |
| | | | | | 19822-20414 |
| | | | | | 20514-20918 |
| | | | | | 20920-27691 |
| | | | | | 27752-28008 |
| | | | | | 28609-29014 |
| | | | | | 29704-31405 |
| | | | | | 32249-32650 |
| | | | | | 32724-32940 |
| | | | | | 33162-34248 |
| | | | | | 34559-34650 |
| HAPBT59 | 13 | 739607 | AC005488 | 202 | 1-64 |
| | | | | | 146-649 |
| | | | | | 860-1255 |
| | | | | | 1544-1967 |
| | | | | | 2179-2586 |
| | | | | | 3209-3329 |
| | | | | | 3352-3793 |
| | | | | | 3882-4429 |
| | | | | | 4709-5500 |
| | | | | | 6298-6448 |
| | | | | | 7106-7528 |
| | | | | | 8873-9090 |
| | | | | | 9679-9928 |
| | | | | | 10437-11025 |
| | | | | | 11101-11353 |
| | | | | | 11567-11949 |
| | | | | | 12163-12800 |
| | | | | | 12811-13262 |
| | | | | | 13374-13798 |
| | | | | | 14137-14406 |
| | | | | | 14795-14894 |
| | | | | | 15470-16319 |
| | | | | | 16826-16956 |
| | | | | | 18305-18415 |
| | | | | | 18533-18695 |
| | | | | | 18793-19764 |
| | | | | | 19812-20404 |
| | | | | | 20507-20911 |
| | | | | | 20938-24387 |
| | | | | | 24406-27740 |
| | | | | | 27799-28054 |
| | | | | | 28656-29114 |
| | | | | | 29750-31442 |
| | | | | | 32284-32686 |
| | | | | | 32759-32975 |
| | | | | | 33197-34282 |
| | | | | | 34383-35007 |
| HAPBT59 | 13 | 739607 | AC073841 | 203 | 1-289 |
| HAPBT59 | 13 | 739607 | AC073841 | 204 | 1-91 |
| HAPBT59 | 13 | 739607 | AC005236 | 205 | 1-342 |
| HAPBT59 | 13 | 739607 | AC005236 | 206 | 1-144 |
| HAPBT59 | 13 | 739607 | AC018720 | 207 | 1-199 |
| HAPBT59 | 13 | 739607 | AC018720 | 208 | 1-106 |
| HAPBT59 | 13 | 739607 | AC006014 | 209 | 1-199 |
| HAPBT59 | 13 | 739607 | AC006014 | 210 | 1-106 |
| HAPBT59 | 13 | 739607 | AC005488 | 211 | 1-156 |
| HAPBT59 | 13 | 739607 | AC005488 | 212 | 1-199 |
| HAPBU51 | 14 | 724824 | AC013457 | 213 | 1-382 |
| | | | | | 3042-3205 |
| HAPBU51 | 14 | 724824 | AC012665 | 214 | 1-382 |
| | | | | | 2198-2645 |
| | | | | | 3050-3213 |
| HAPBU55 | 15 | 732487 | AL118555 | 215 | 1-326 |
| HAPNM31 | 16 | 881916 | AC012529 | 216 | 1-95 |
| | | | | | 1883-2004 |
| | | | | | 4682-4779 |
| HAPNR68 | 18 | 848699 | AC008731 | 217 | 1-772 |
| | | | | | 1219-1601 |
| | | | | | 4617-5959 |
| | | | | | 6212-6493 |
| | | | | | 6561-7316 |
| | | | | | 8504-9304 |
| | | | | | 9681-9796 |
| | | | | | 10102-10400 |
| | | | | | 11532-11634 |
| | | | | | 12045-12521 |
| | | | | | 14018-14302 |
| | | | | | 14437-14626 |
| | | | | | 14772-14920 |
| | | | | | 15021-16854 |
| HAPNR68 | 18 | 848699 | AC046167 | 218 | 1-190 |
| | | | | | 337-485 |
| | | | | | 586-2419 |
| HAPNR68 | 18 | 848699 | AC008731 | 219 | 1-523 |
| HAPNR68 | 18 | 848699 | AC008731 | 220 | 1-484 |
| HAPNR68 | 18 | 848699 | AC046167 | 221 | 1-285 |
| HAPNR68 | 18 | 848699 | AC046167 | 222 | 1-484 |
| HAPOK85 | 20 | 848692 | AC018414 | 223 | 1-439 |
| HAPOK85 | 20 | 848692 | AC073263 | 224 | 1-310 |
| | | | | | 1311-1568 |
| | | | | | 2160-2601 |
| | | | | | 2705-6742 |
| | | | | | 7737-8326 |
| | | | | | 8650-8874 |
| | | | | | 8946-9076 |
| | | | | | 9520-9617 |
| | | | | | 9832-9933 |
| | | | | | 10763-10873 |
| | | | | | 11007-11401 |
| | | | | | 11496-11560 |
| | | | | | 12090-12265 |
| | | | | | 12988-13117 |
| HAPOK85 | 20 | 848692 | AC018414 | 225 | 1-4039 |
| HAPOK85 | 20 | 848692 | AC073263 | 226 | 1-293 |
| HAPON27 | 21 | 701741 | AL159997 | 227 | 1-116 |
| | | | | | 1855-1927 |
| | | | | | 3181-3481 |
| | | | | | 4178-4596 |
| | | | | | 4936-5088 |
| | | | | | 5796-6043 |
| | | | | | 6413-6757 |
| | | | | | 6775-6889 |
| | | | | | 8976-9073 |
| | | | | | 9533-9910 |
| | | | | | 10093-10281 |
| | | | | | 11197-11291 |
| | | | | | 12355-12676 |
| | | | | | 12931-13095 |
| | | | | | 13139-13917 |
| | | | | | 13924-14367 |
| | | | | | 14479-15052 |
| | | | | | 16184-16641 |
| | | | | | 18649-18737 |
| | | | | | 18756-19247 |
| | | | | | 20693-21269 |
| | | | | | 21761-22512 |
| | | | | | 22825-23126 |
| | | | | | 23171-26995 |
| HAPON27 | 21 | 701741 | AL159997 | 228 | 1-287 |
| | | | | | 342-445 |
| RAPOX59 | 22 | 587526 | AC007655 | 229 | 1-223 |
| | | | | | 1703-1748 |
| | | | | | 2285-2380 |
| | | | | | 2590-3226 |
| | | | | | 3259-5363 |
| HAPOX59 | 22 | 587526 | AC007655 | 230 | 1-582 |
| HAPPX64 | 23 | 786559 | AL096814 | 231 | 1-60 |
| | | | | | 870-901 |
| | | | | | 3516-3584 |
| | | | | | 3646-3745 |
| | | | | | 5944-6081 |
| | | | | | 7266-7374 |
| | | | | | 8905-9004 |
| | | | | | 9487-11172 |
| HAPPX64 | 23 | 786559 | AL096814 | 232 | 1-45 |
| | | | | | 71-191 |
| HAPPX64 | 23 | 786559 | AL096814 | 233 | 1-100 |
| HAPSG03 | 24 | 923690 | AC073080 | 234 | 1-1169 |
| HAPSG03 | 24 | 923690 | AC073080 | 235 | 1-309 |
| HAPSG03 | 24 | 923690 | AC073080 | 236 | 1-856 |
| | | | | | 888-1088 |
| HAPSP70 | 25 | 720687 | AL161618 | 237 | 1-357 |
| HAPSP70 | 25 | 720687 | AL161618 | 238 | 1-214 |
| | | | | | 1937-2100 |
| HAPSQ88 | 26 | 847529 | AL022324 | 239 | 1-532 |
| HAPSQ88 | 26 | 847529 | AL022324 | 240 | 1-216 |
| | | | | | 4077-4520 |
| | | | | | 4843-5306 |
| | | | | | 5589-5786 |
| HAPST65 | 29 | 864789 | AC012305 | 241 | 1-517 |
| HAPSU75 | 30 | 767111 | AC005479 | 242 | 1-45 |
| | | | | | 1019-1062 |
| | | | | | 1196-1879 |
| | | | | | 3349-3510 |
| | | | | | 3770-3952 |
| HAPSU75 | 30 | 767111 | AC013451 | 243 | 1-32 |
| | | | | | 3410-3534 |
| | | | | | 4508-4551 |
| | | | | | 4685-5368 |
| | | | | | 6838-7002 |
| | | | | | 7259-7441 |
| HAPTL74 | 32 | 765047 | AC023500 | 244 | 1-288 |
| | | | | | 534-721 |
| | | | | | 1172-1310 |
| | | | | | 2770-2908 |
| | | | | | 3074-3186 |
| | | | | | 3219-3739 |
| | | | | | 4006-4153 |
| | | | | | 6574-7686 |
| | | | | | 8669-8981 |
| | | | | | 9354-9949 |
| | | | | | 10346-13446 |
| | | | | | 13501-14067 |
| | | | | | 14135-14962 |
| HAPTL74 | 32 | 765047 | AC073896 | 245 | 1-98 |
| | | | | | 131-651 |
| | | | | | 918-1036 |
| HAPTL74 | 32 | 765047 | AC023500 | 246 | 1-134 |
| HAPTL74 | 32 | 765047 | AC023500 | 247 | 1-401 |
| HAPTL74 | 32 | 765047 | AC073896 | 248 | 1-139 |
| HLJBE19 | 36 | 953727 | AC025396 | 249 | 1-281 |
| HLJBE19 | 36 | 953727 | AC025396 | 250 | 1-159 |
| HLJBE19 | 36 | 953727 | AC025396 | 251 | 1-226 |
| HLJDL84 | 37 | 782823 | AL357293 | 252 | 1-474 |
| HLJDL84 | 37 | 782823 | AL353607 | 253 | 1-474 |
| HLJDL84 | 37 | 782823 | AL357653 | 254 | 1-474 |
| HLJDZ49 | 38 | 923476 | AC067868 | 255 | 1-124 |
| HLJDZ49 | 38 | 923476 | AC067868 | 256 | 1-159 |
| HNLMB07 | 39 | 951944 | AC027125 | 257 | 1-393 |
| HNLMB07 | 39 | 951944 | AC020627 | 258 | 1-121 |
| | | | | | 308-506 |
| | | | | | 1488-2225 |
| | | | | | 2829-3221 |
| | | | | | 4455-4558 |
| HNLMB07 | 39 | 951944 | AC027125 | 259 | 1-646 |
| HNLMB07 | 39 | 951944 | AC020627 | 260 | 1-1131 |
| HLJEB53 | 40 | 727924 | AC010102 | 261 | 1-260 |
| | | | | | 2689-3516 |
| | | | | | 4245-4707 |
| | | | | | 5659-5767 |
| | | | | | 6158-6268 |
| | | | | | 6385-6488 |
| | | | | | 7828-9805 |
| | | | | | 10590-10733 |
| | | | | | 11376-11699 |
| | | | | | 12517-12695 |
| | | | | | 13595-14477 |
| | | | | | 16001-19518 |
| | | | | | 19991-20107 |
| | | | | | 23374-23626 |
| HLJEB53 | 40 | 727924 | AL109840 | 262 | 1-260 |
| | | | | | 2689-3516 |
| | | | | | 4245-4708 |
| | | | | | 5660-5768 |
| | | | | | 6159-6269 |
| | | | | | 6386-6489 |
| | | | | | 7829-9814 |
| | | | | | 10599-10742 |
| | | | | | 11385-11708 |
| | | | | | 12526-12704 |
| | | | | | 13604-14486 |
| | | | | | 16010-19527 |
| | | | | | 20000-20116 |
| | | | | | 23380-23632 |
| HLJDZ06 | 41 | 934837 | AC074374 | 263 | 1-119 |
| | | | | | 252-835 |
| HLJDZ06 | 41 | 934837 | AC026843 | 264 | 1-120 |
| | | | | | 253-836 |
| HLJDZ06 | 41 | 934837 | AC074374 | 265 | 1-348 |
| HLJDZ06 | 41 | 934837 | AC026843 | 266 | 1-349 |
| HLJDU56 | 42 | 853274 | AL138712 | 267 | 1-2359 |
| HLJDU56 | 42 | 853274 | AL138712 | 268 | 1-161 |
| | | | | | 2263-2922 |
| | | | | | 3418-3712 |
| | | | | | 4419-4857 |
| HLJDO57 | 44 | 734445 | AC007906 | 269 | 1-1300 |
| HLJDO57 | 44 | 734445 | AC007906 | 270 | 1-89 |
| HLJDN60 | 46 | 740061 | AC009944 | 271 | 1-1227 |
| HLJBR43 | 47 | 948850 | AC009019 | 272 | 1-106 |
| | | | | | 1924-2066 |
| | | | | | 2522-2880 |
| | | | | | 3547-3694 |
| | | | | | 4458-4609 |
| | | | | | 5714-5801 |
| | | | | | 6274-6398 |
| HLJBR43 | 47 | 948850 | AC009034 | 273 | 1-106 |
| | | | | | 1924-2066 |
| | | | | | 2522-2880 |
| | | | | | 3547-3694 |
| | | | | | 4069-4166 |
| | | | | | 4458-4609 |
| | | | | | 5714-5801 |
| | | | | | 6274-6398 |
| HLJBE22 | 48 | 674819 | AL160272 | 274 | 1-734 |
| HLJBE22 | 48 | 674819 | AL160272 | 275 | 1-814 |
| HLJBE22 | 48 | 674819 | AL160272 | 276 | 1-591 |
| | | | | | 1195-1499 |
| | | | | | 1777-2505 |
| HIDAF76 | 50 | 857563 | AC068333 | 277 | 1-893 |
| HIDAF76 | 50 | 857563 | AC068333 | 278 | 1-278 |
| HIDAF76 | 50 | 857563 | AC068333 | 279 | 1-472 |
| HIDAE12 | 51 | 968936 | AL359634 | 280 | 1-756 |
| HIDAE12 | 51 | 968936 | AL132874 | 281 | 1-767 |
| HIDAE12 | 51 | 968936 | AL121656 | 282 | 1-336 |
| | | | | | 465-1681 |
| | | | | | 1822-4167 |
| HIDAE12 | 51 | 968936 | AL365275 | 283 | 1-756 |
| HIDAA03 | 52 | 922105 | AL359876 | 284 | 1-123 |
| | | | | | 479-615 |
| | | | | | 3610-4005 |
| | | | | | 4246-4410 |
| | | | | | 4759-4916 |
| | | | | | 5688-5934 |
| | | | | | 8229-8299 |
| | | | | | 9464-9525 |
| | | | | | 9981-10080 |
| | | | | | 11047-11503 |
| | | | | | 12069-12185 |
| | | | | | 13123-13590 |
| | | | | | 15144-15585 |
| | | | | | 15871-16398 |
| | | | | | 16700-17435 |
| | | | | | 18190-18338 |
| | | | | | 18645-19119 |
| | | | | | 19697-20375 |
| | | | | | 20846-21174 |
| | | | | | 21284-21829 |
| | | | | | 21835-22007 |
| | | | | | 22129-22276 |
| | | | | | 22901-25279 |
| HIDAA03 | 52 | 922105 | AL137800 | 285 | 1-123 |
| | | | | | 479-615 |
| | | | | | 3610-4005 |
| | | | | | 4246-4410 |
| | | | | | 4759-4916 |
| | | | | | 5688-5934 |
| | | | | | 8229-8299 |
| | | | | | 9464-9525 |
| | | | | | 11047-11503 |
| | | | | | 12069-12185 |
| | | | | | 13123-13590 |
| | | | | | 15142-15583 |
| | | | | | 15869-16396 |
| | | | | | 16698-17433 |
| | | | | | 18188-18336 |
| | | | | | 18643-19117 |
| | | | | | 19695-20373 |
| | | | | | 20844-21172 |
| | | | | | 21282-21827 |
| | | | | | 21833-22005 |
| | | | | | 22127-22274 |
| | | | | | 22899-25277 |
| HIDAA03 | 52 | 922105 | AL359876 | 286 | 1-567 |
| HIDAA03 | 52 | 922105 | AL137800 | 287 | 1-567 |
| HAPTN70 | 55 | 756764 | AC078887 | 288 | 1-139 |
| | | | | | 221-387 |
| | | | | | 487-1595 |
| | | | | | 1609-1865 |
| HAPTN70 | 55 | 756764 | AC026491 | 289 | 1-606 |
| | | | | | 620-875 |
| | | | | | 1568-4544 |
| HAPTN70 | 55 | 756764 | AC026491 | 290 | 1-731 |
| HAPTK51 | 56 | 719671 | AC019259 | 291 | 1-435 |
| HAPTK51 | 56 | 719671 | AL022395 | 292 | 1-466 |
| | | | | | 3482-3822 |
| | | | | | 4489-4835 |
| | | | | | 9658-10006 |
| | | | | | 10629-10809 |
| | | | | | 14666-15246 |
| | | | | | 17973-18073 |
| | | | | | 20754-20826 |
| | | | | | 25652-25966 |
| | | | | | 26380-27922 |
| | | | | | 28216-28487 |
| | | | | | 28737-29333 |
| | | | | | 29428-29743 |
| | | | | | 30589-31023 |
| | | | | | 31154-32844 |
| HAPTK51 | 56 | 719671 | AC019259 | 293 | 1-316 |
| HAPTK51 | 56 | 719671 | AL022395 | 294 | 1-1835 |
| | | | | | 5537-6175 |
| HAPTF84 | 57 | 782436 | AC061708 | 295 | 1-28 |
| | | | | | 506-1039 |
| | | | | | 1792-2177 |
| | | | | | 3373-5310 |
| HAPSY61 | 58 | 871280 | AC004945 | 296 | 1-1612 |
| | | | | | 2149-2189 |
| HAPSY61 | 58 | 871280 | AC004945 | 297 | 1-106 |
| | | | | | 197-1265 |
| | | | | | 1385-1778 |
| | | | | | 2150-2538 |
| | | | | | 2773-3195 |
| | | | | | 3944-4085 |
| | | | | | 4705-4950 |
| HAPSY61 | 58 | 871280 | AC004945 | 298 | 1-1720 |
| HAPSU60 | 59 | 743381 | AL121845 | 299 | 1-182 |
| | | | | | 465-674 |
| | | | | | 1255-1622 |
| | | | | | 2009-2199 |
| | | | | | 2271-2934 |
| | | | | | 3020-5581 |
| | | | | | 5669-6104 |
| | | | | | 6261-7109 |
| HAPSU60 | 59 | 743381 | AL158091 | 300 | 1-208 |
| | | | | | 789-1156 |
| | | | | | 1543-1733 |
| | | | | | 1805-2468 |
| | | | | | 2554-5115 |
| | | | | | 5203-5638 |
| | | | | | 5795-6643 |
| HAPSU60 | 59 | 743381 | AL353715 | 301 | 1-182 |
| | | | | | 465-674 |
| | | | | | 1255-1622 |
| | | | | | 2009-2199 |
| | | | | | 2271-2934 |
| | | | | | 3020-5177 |
| HAPSU60 | 59 | 743381 | AL121845 | 302 | 1-30 |
| | | | | | 128-240 |
| | | | | | 469-973 |
| | | | | | 1045-1494 |
| | | | | | 1665-1991 |
| | | | | | 2028-2347 |
| | | | | | 2441-2953 |
| HAPSU60 | 59 | 743381 | AL121845 | 303 | 1-316 |
| | | | | | 2361-2648 |
| | | | | | 3762-3918 |
| | | | | | 5701-5914 |
| HAPSU60 | 59 | 743381 | AL158091 | 304 | 1-30 |
| | | | | | 128-240 |
| | | | | | 469-973 |
| | | | | | 1044-1493 |
| | | | | | 1664-1985 |
| | | | | | 2022-2341 |
| | | | | | 2435-2947 |
| HAPSU60 | 59 | 743381 | AL158091 | 305 | 1-316 |
| | | | | | 2378-2634 |
| | | | | | 3762-3918 |
| | | | | | 5583-5796 |
| HAPSU60 | 59 | 743381 | AL353715 | 306 | 1-30 |
| | | | | | 118-230 |
| | | | | | 459-963 |
| | | | | | 1034-1484 |
| | | | | | 1655-1981 |
| | | | | | 2018-2337 |
| | | | | | 2431-2943 |
| HAPSN95 | 60 | 733638 | AC023073 | 307 | 1-576 |
| | | | | | 1183-1665 |
| IIAPSN95 | 60 | 733638 | AC023073 | 308 | 1-375 |
| HAPSN95 | 60 | 733638 | AC023073 | 309 | 1-226 |
| HAPSL79 | 61 | 774352 | AC074388 | 310 | 1-113 |
| | | | | | 945-1521 |
| | | | | | 2500-3179 |
| | | | | | 3329-3952 |
| HAPSL79 | 61 | 774352 | AC074388 | 311 | 1-256 |
| | | | | | 387-628 |
| | | | | | 681-754 |
| | | | | | 1115-2019 |
| | | | | | 3355-3593 |
| HAPSK65 | 63 | 747743 | AL356298 | 312 | 1-2225 |
| | | | | | 2351-4673 |
| HAPSK65 | 63 | 747743 | AL109625 | 313 | 1-2139 |
| HAPSI85 | 64 | 784168 | AL357336 | 314 | 1-79 |
| | | | | | 1471-1586 |
| | | | | | 2219-2375 |
| | | | | | 3401-3694 |
| HAPSI44 | 65 | 716366 | AC009097 | 315 | 1-1453 |
| HAPSI44 | 65 | 716366 | AC009097 | 316 | 1-190 |
| HAPSI44 | 65 | 716366 | AC009097 | 317 | 1-462 |
| HAPSC58 | 66 | 735503 | AC011944 | 318 | 1-619 |
| | | | | | 1009-1527 |
| HAPSC58 | 66 | 735503 | AC015970 | 319 | 1-59 |
| | | | | | 2857-3475 |
| | | | | | 3865-4383 |
| | | | | | 5198-5306 |
| HAPSC58 | 66 | 735503 | AC011944 | 320 | 1-393 |
| HAPSC58 | 66 | 735503 | AC015970 | 321 | 1-393 |
| HAPSC06 | 67 | 933285 | AC016811 | 322 | 1-366 |
| | | | | | 1328-1570 |
| HAPSC06 | 67 | 933285 | AC016811 | 323 | 1-553 |
| HAPSA17 | 68 | 662678 | AC011768 | 324 | 1-147 |
| | | | | | 723-1272 |
| | | | | | 1330-1807 |
| | | | | | 2396-2806 |
| | | | | | 3301-3671 |
| | | | | | 3965-4669 |
| | | | | | 6926-7079 |
| | | | | | 7245-8097 |
| | | | | | 8120-8826 |
| | | | | | 9660-10785 |
| HAPSAI7 | 68 | 662678 | AC022845 | 325 | 1-62 |
| | | | | | 1250-1737 |
| | | | | | 3246-3367 |
| | | | | | 3667-4009 |
| | | | | | 4978-5149 |
| | | | | | 5327-5646 |
| | | | | | 6950-7052 |
| | | | | | 7210-7646 |
| | | | | | 9352-9624 |
| | | | | | 10200-10749 |
| | | | | | 10807-11284 |
| | | | | | 11873-12283 |
| | | | | | 12777-13147 |
| | | | | | 13441-14145 |
| | | | | | 16403-16556 |
| | | | | | 16722-17574 |
| | | | | | 17597-18303 |
| | | | | | 19137-20261 |
| HAPSA17 | 68 | 662678 | AP000585 | 326 | 1-371 |
| HAPSA17 | 68 | 662678 | AP000642 | 327 | 1-371 |
| HAPSA17 | 68 | 662678 | AC021329 | 328 | 1-103 |
| | | | | | 261-699 |
| | | | | | 2404-2676 |
| | | | | | 3252-3801 |
| | | | | | 3859-4336 |
| | | | | | 4925-5335 |
| | | | | | 5830-6200 |
| | | | | | 6494-7198 |
| | | | | | 9455-9608 |
| | | | | | 9774-10626 |
| | | | | | 10649-11355 |
| | | | | | 12190-13315 |
| HAPSA17 | 68 | 662678 | AP000585 | 329 | 1-705 |
| HAPSA17 | 68 | 662678 | AC011768 | 330 | 1-193 |
| HAPSA17 | 68 | 662678 | AC022845 | 331 | 1-194 |
| HAPSA17 | 68 | 662678 | AP000585 | 332 | 1-411 |
| HAPSA17 | 68 | 662678 | AP000642 | 333 | 1-411 |
| HAPSA17 | 68 | 662678 | AP000642 | 334 | 1-704 |
| HAPSA17 | 68 | 662678 | AC021329 | 335 | 1-193 |
| HAPRM40 | 69 | 587668 | AL121865 | 336 | 1-284 |
| | | | | | 1448-1592 |
| | | | | | 4852-5023 |
| HAPRM40 | 69 | 587668 | AL121865 | 337 | 1-256 |
| HAPRM40 | 69 | 587668 | AL121865 | 338 | 1-113 |
| HAPRJ45 | 70 | 758111 | AC024725 | 339 | 1-176 |
| | | | | | 265-319 |
| | | | | | 1149-1291 |
| | | | | | 1436-1877 |
| | | | | | 1981-2257 |
| HAPRG26 | 71 | 680612 | AC073527 | 340 | 1-183 |
| | | | | | 5215-5325 |
| HAPRG26 | 71 | 680612 | AC073527 | 341 | 1-349 |
| HAPRB02 | 72 | 919555 | AP000803 | 342 | 1-663 |
| HAPRB02 | 72 | 919555 | AP001459 | 343 | 1-663 |
| HAPRB02 | 72 | 919555 | AP001362 | 344 | 1-620 |
| HAPRB02 | 72 | 919555 | AP001362 | 345 | 1-485 |
| | | | | | 769-956 |
| HAPRB02 | 72 | 919555 | AP000803 | 346 | 1-485 |
| | | | | | 769-956 |
| | | | | | 1912-2083 |
| HAPRB02 | 72 | 919555 | AP001459 | 347 | 1-485 |
| HAPQQ45 | 74 | 587591 | AC048342 | 348 | 1-907 |
| HAPQQ45 | 74 | 587591 | AC025838 | 349 | 1-907 |
| HAPQQ45 | 74 | 587591 | AC018658 | 350 | 1-907 |
| HAPQQ45 | 74 | 587591 | AC048342 | 351 | 1-299 |
| HAPQQ45 | 74 | 587591 | AC025838 | 352 | 1-299 |
| HAPQQ45 | 74 | 587591 | AC018658 | 353 | 1-299 |
| HAPQQ45 | 74 | 587591 | AC018658 | 354 | 1-507 |
| HAPQJ23 | 75 | 587566 | AL122009 | 355 | 1-1830 |
| HAPQJ23 | 75 | 587566 | AC026909 | 356 | 1-1830 |
| HAPQJ23 | 75 | 587566 | AC026909 | 357 | 1-118 |
| HAPPW61 | 77 | 801982 | AC018653 | 358 | 1-3230 |
| HAPPW61 | 77 | 801982 | AC018653 | 359 | 1-572 |
| | | | | | 1792-2225 |
| HAPOT58 | 79 | 951615 | AC026290 | 360 | 1-206 |
| | | | | | 1438-1590 |
| | | | | | 1883-3456 |
| | | | | | 3557-3668 |
| | | | | | 5610-6200 |
| | | | | | 6247-6320 |
| HAPOT58 | 79 | 951615 | AC026290 | 361 | 1-584 |
| HAPOT10 | 81 | 964373 | AC025130 | 362 | 1-262 |
| | | | | | 336-451 |
| | | | | | 1648-2173 |
| | | | | | 2429-3133 |
| | | | | | 3218-3276 |
| HAPOT10 | 81 | 964373 | AC023429 | 363 | 1-262 |
| | | | | | 336-451 |
| | | | | | 1648-2173 |
| | | | | | 2429-3133 |
| | | | | | 3218-3273 |
| HAPOS73 | 82 | 587512 | AL008724 | 364 | 1-44 |
| | | | | | 2555-2755 |
| | | | | | 3241-3537 |
| | | | | | 5531-5801 |
| | | | | | 5964-6926 |
| | | | | | 7281-7386 |
| | | | | | 8061-8375 |
| | | | | | 8784-9909 |
| | | | | | 9967-11901 |
| HAPOS73 | 82 | 587512 | AL033538 | 365 | 1-518 |
| HAPOS73 | 82 | 587512 | AL008724 | 366 | 1-2371 |
| HAPOS73 | 82 | 587512 | AL008724 | 367 | 1-929 |
| HAPOS73 | 82 | 587512 | AL033538 | 368 | 1-2372 |
| HAPOS73 | 82 | 587512 | AL033538 | 369 | 1-44 |
| | | | | | 2556-2756 |
| | | | | | 3242-3536 |
| | | | | | 5528-5798 |
| | | | | | 5961-6923 |
| | | | | | 7278-7383 |
| | | | | | 8058-8372 |
| | | | | | 8781-9906 |
| | | | | | 9964-11374 |
| HAPON47 | 83 | 934577 | AC018636 | 370 | 1-1712 |
| | | | | | 1781-2220 |
| | | | | | 2775-3125 |
| | | | | | 4267-4398 |
| | | | | | 4943-5119 |
| | | | | | 5395-6479 |
| | | | | | 6593-6736 |
| | | | | | 8582-8759 |
| | | | | | 9851-10352 |
| | | | | | 10560-11273 |
| | | | | | 11554-11699 |
| | | | | | 13092-13782 |
| | | | | | 13894-14174 |
| | | | | | 14184-16225 |
| HAPON47 | 83 | 934577 | AC008026 | 371 | 1-1712 |
| HAPON47 | 83 | 934577 | AC010655 | 372 | 1-28 |
| | | | | | 703-841 |
| | | | | | 1183-1622 |
| | | | | | 2455-4385 |
| | | | | | 5406-5711 |
| | | | | | 5773-6121 |
| | | | | | 6849-6936 |
| | | | | | 7237-7389 |
| | | | | | 7942-8101 |
| | | | | | 8412-9474 |
| HAPON47 | 83 | 934577 | AC018636 | 373 | 1-687 |
| HAPON47 | 83 | 934577 | AC018636 | 374 | 1-382 |
| HAPON47 | 83 | 934577 | AC008026 | 375 | 1-440 |
| HAPON47 | 83 | 934577 | AC010655 | 376 | 1-106 |
| HAPOI08 | 85 | 959128 | AC020769 | 377 | 1-151 |
| | | | | | 418-990 |
| | | | | | 1147-1837 |
| | | | | | 2517-2698 |
| | | | | | 3650-4127 |
| | | | | | 4707-4782 |
| | | | | | 6189-6498 |
| | | | | | 6727-6800 |
| | | | | | 7463-7570 |
| | | | | | 8425-8513 |
| | | | | | 8791-8893 |
| | | | | | 10093-10426 |
| | | | | | 10902-10999 |
| | | | | | 11833-11914 |
| | | | | | 12657-12711 |
| | | | | | 15096-15230 |
| | | | | | 16465-16903 |
| | | | | | 17085-17114 |
| | | | | | 22718-23169 |
| | | | | | 23288-23355 |
| | | | | | 25017-25146 |
| | | | | | 25987-26085 |
| | | | | | 27830-28161 |
| | | | | | 29423-29566 |
| | | | | | 30333-30650 |
| | | | | | 33534-33991 |
| | | | | | 34317-34912 |
| | | | | | 35334-35559 |
| | | | | | 35819-36071 |
| | | | | | 36763-37206 |
| HAPOI08 | 85 | 959128 | AC009090 | 378 | 1-124 |
| | | | | | 1970-2064 |
| | | | | | 4688-4871 |
| | | | | | 5136-5708 |
| | | | | | 5865-6555 |
| | | | | | 7235-7416 |
| | | | | | 8368-8845 |
| | | | | | 9424-9499 |
| | | | | | 10907-11216 |
| | | | | | 11445-11518 |
| | | | | | 12293-12395 |
| | | | | | 13143-13231 |
| | | | | | 13509-13611 |
| | | | | | 14811-15144 |
| | | | | | 15620-15717 |
| | | | | | 16551-16632 |
| | | | | | 17371-17425 |
| | | | | | 19810-19944 |
| | | | | | 21179-21617 |
| | | | | | 21799-21828 |
| | | | | | 27432-27883 |
| | | | | | 28002-28069 |
| | | | | | 29731-29860 |
| | | | | | 30703-30801 |
| | | | | | 32545-32876 |
| | | | | | 34138-34281 |
| | | | | | 35047-35364 |
| | | | | | 38249-38707 |
| | | | | | 39033-39628 |
| | | | | | 40050-40275 |
| | | | | | 40535-40787 |
| | | | | | 40841-41919 |
| HAPOI08 | 85 | 959128 | AC023825 | 379 | 1-596 |
| HAPOI08 | 85 | 959128 | AC020769 | 380 | 1-390 |
| HAPOI08 | 85 | 959128 | AC009090 | 381 | 1-390 |
| HAPOI08 | 85 | 959128 | AC023825 | 382 | 1-226 |
| | | | | | 486-738 |
| | | | | | 792-1871 |
| HAPOI08 | 85 | 959128 | AC023825 | 383 | 1-459 |
| HAPNY68 | 87 | 752906 | AC026546 | 384 | 1-464 |
| | | | | | 906-1387 |
| | | | | | 2856-3677 |
| | | | | | 3767-5037 |
| | | | | | 5642-5775 |
| | | | | | 6002-6567 |
| | | | | | 7037-7104 |
| | | | | | 7733-7895 |
| | | | | | 8197-8280 |
| HAPNY68 | 87 | 752906 | AC058783 | 385 | 1-108 |
| | | | | | 472-583 |
| | | | | | 1659-1759 |
| | | | | | 2301-2392 |
| | | | | | 2712-2979 |
| | | | | | 3109-3313 |
| | | | | | 3496-3686 |
| | | | | | 5094-5501 |
| | | | | | 5898-7517 |
| | | | | | 7923-8386 |
| | | | | | 8828-9312 |
| | | | | | 10777-11598 |
| | | | | | 11688-12958 |
| | | | | | 13563-13696 |
| | | | | | 13923-14488 |
| | | | | | 14952-15025 |
| | | | | | 15654-15816 |
| | | | | | 16107-16496 |
| | | | | | 17141-17423 |
| | | | | | 17436-18535 |
| HAPNY68 | 87 | 752906 | AC058783 | 386 | 1-92 |
| | | | | | 801-1249 |
| | | | | | 1761-1892 |
| | | | | | 3287-3573 |
| | | | | | 5219-5288 |
| HAPNY68 | 87 | 752906 | AC026546 | 387 | 1-892 |
| HAPNS86 | 88 | 587322 | AC048331 | 388 | 1-811 |
| HAPNS86 | 88 | 587322 | AC023415 | 389 | 1-470 |
| HAPNS86 | 88 | 587322 | AC048331 | 390 | 1-981 |
| HAPNN11 | 90 | 966797 | AC051619 | 391 | 1-442 |
| HAPNN11 | 90 | 966797 | AC011839 | 392 | 1-579 |
| HAPNN11 | 90 | 966797 | AC051619 | 393 | 1-511 |
| HAPNN11 | 90 | 966797 | AC011839 | 394 | 1-298 |
| HAPNM66 | 91 | 616165 | AC024740 | 395 | 1-263 |
| | | | | | 1217-1495 |
| | | | | | 1537-2007 |
| | | | | | 2041-2192 |
| | | | | | 2310-2414 |
| | | | | | 2824-3288 |
| | | | | | 3630-4480 |
| | | | | | 4688-4808 |
| HAPNM66 | 91 | 616165 | AC040922 | 396 | 1-312 |
| | | | | | 1270-1548 |
| | | | | | 1590-2060 |
| | | | | | 2094-2245 |
| | | | | | 2363-2467 |
| | | | | | 2877-3341 |
| | | | | | 3683-4533 |
| | | | | | 4741-4861 |
| HAPNM66 | 91 | 616165 | AC008888 | 397 | 1-312 |
| | | | | | 1266-1544 |
| | | | | | 1586-2056 |
| | | | | | 2090-2241 |
| | | | | | 2359-2463 |
| | | | | | 2873-3337 |
| | | | | | 3679-4529 |
| | | | | | 4737-4912 |
| | | | | | 7248-7389 |
| | | | | | 7450-7587 |
| | | | | | 7597-7711 |
| | | | | | 8236-8663 |
| HAPNM66 | 91 | 616165 | AC024740 | 398 | 1-205 |
| HAPNM66 | 91 | 616165 | AC040922 | 399 | 1-210 |
| HAPNM66 | 91 | 616165 | AC008888 | 400 | 1-210 |
| HAPNK27 | 92 | 848723 | AC068533 | 401 | 1-1942 |
| HAPNK27 | 92 | 848723 | AC068533 | 402 | 1-464 |
| HAPNI71 | 93 | 587276 | AC024190 | 403 | 1-2534 |
| HAPNI71 | 93 | 587276 | AC024190 | 404 | 1-772 |
| HAPMF94 | 95 | 796830 | AP001178 | 405 | 1-64 |
| | | | | | 1387-1555 |
| | | | | | 2308-2860 |
| | | | | | 2911-3042 |
| | | | | | 4156-4478 |
| | | | | | 4804-5479 |
| | | | | | 7883-8065 |
| | | | | | 8150-8210 |
| HAPMP94 | 95 | 796830 | AC020697 | 406 | 1-676 |
| HAPMF94 | 95 | 796830 | AP001097 | 407 | 1-676 |
| HAPMF94 | 95 | 796830 | AC021474 | 408 | 1-676 |
| HAPMF94 | 95 | 796830 | AP001020 | 409 | 1-131 |
| | | | | | 1245-1567 |
| | | | | | 1893-2568 |
| | | | | | 4972-5154 |
| | | | | | 5239-5299 |
| HAPMF94 | 95 | 796830 | AC021474 | 410 | 1-323 |
| HAPMF94 | 95 | 796830 | AP001020 | 411 | 1-553 |
| HAPMF94 | 95 | 796830 | AP001178 | 412 | 1-1627 |
| | | | | | 3562-3594 |
| | | | | | 4111-4551 |
| | | | | | 4565-5184 |
| | | | | | 6160-6599 |
| | | | | | 6623-7139 |
| | | | | | 7884-8185 |
| | | | | | 8789-8886 |
| HAPMF94 | 95 | 796830 | AP001097 | 413 | 1-323 |
| HAPMF94 | 95 | 796830 | AP001020 | 414 | 1-1627 |
| | | | | | 3562-3594 |
| | | | | | 4111-4551 |
| | | | | | 4565-5184 |
| | | | | | 6160-6599 |
| | | | | | 6623-7139 |
| | | | | | 7884-8184 |
| | | | | | 8790-8887 |
| HAPBR65 | 97 | 753903 | AC067945 | 415 | 1-492 |
| | | | | | 744-1640 |
| HAPBR6S | 97 | 753903 | AC067945 | 416 | 1-401 |
| | | | | | 705-1847 |
| | | | | | 1854-1904 |
| | | | | | 1961-2470 |
| | | | | | 3000-3633 |
| HAPBR65 | 97 | 753903 | AC067945 | 417 | 1-605 |
| HAPBP08 | 99 | 960299 | AC069193 | 418 | 1-4652 |
| | | | | | 4961-5690 |
| HAPBP08 | 99 | 960299 | AL049629 | 419 | 1-4651 |
| | | | | | 4960-5689 |
| HAPBP08 | 99 | 960299 | AC069193 | 420 | 1-2271 |
| HAPBP08 | 99 | 960299 | AL049629 | 421 | 1-318 |
| | | | | | 3121-3892 |
| | | | | | 4217-4354 |
| | | | | | 5226-5327 |
| | | | | | 11754-14024 |
| HAPAJ81 | 101 | 778553 | AC044815 | 422 | 1-1216 |
| | | | | | 1365-4607 |
| HAPAJ81 | 101 | 778553 | AL355598 | 423 | 1-1216 |
| | | | | | 1365-4607 |
| HAPAJ81 | 101 | 778553 | AL157788 | 424 | 1-1216 |
| | | | | | 1365-1579 |
| HAPAJ81 | 101 | 778553 | AC026587 | 425 | 1-1216 |
| | | | | | 1365-1579 |
| HAPAJ81 | 101 | 778553 | AL355598 | 426 | 1-1076 |
| HAPAJ81 | 101 | 778553 | AL157788 | 427 | 1-1128 |
| HAPAJ81 | 101 | 778553 | AC026587 | 428 | 1-219 |
| | | | | | 568-1695 |

[0056] Table 1B summarizes additional polynucleotides encompassed by the invention (including cDNA clones related to the sequences (Clone ID NO:Z), contig sequences (contig identifier (Contig ID:) contig nucleotide sequence identifiers (SEQ ID NO:X)), and genomic sequences (SEQ ID NO:B). The first column provides a unique clone identifier, “Clone ID NO:Z”, for a cDNA clone related to each contig sequence. The second column provides the sequence identifier, “SEQ ID NO:X”, for each contig sequence. The third column provides a unique contig identifier, “Contig ID:” for each contig sequence. The fourth column, provides a BAC identifier “BAC ID NO:A” for the BAC clone referenced in the corresponding row of the table. The fifth column provides the nucleotide sequence identifier, “SEQ ID NO:B” for a fragment of the BAC clone identified in column four of the corresponding row of the table. The sixth column, “Exon From-To”, provides the location (i.e., nucleotide position numbers) within the polynucleotide sequence of SEQ ID NO:B which delineate certain polynucleotides of the invention that are also exemplary members of polynucleotide sequences that encode polypeptides of the invention (e.g., polypeptides containing amino acid sequences encoded by the polynucleotide sequences delineated in column six, and fragments and variants thereof).

TABLE 2

| | | SEQ | | | | Score/ | | |
|---|---|---|---|---|---|---|---|---|
| Clone ID | Contig | ID | Analysis | | PFam/NR | Percent | NT | NT |
| NO:Z | ID: | NO:X | Method | PFam/NR Description | Acession Number | Identity | From | To |
| HLJBD62 | 558975 | 35 | HMMER | PFAM: Prokaryotic | PF00384 | 13.58 | 80 | 133 |
| | | | 1.8 | molybdopterin | | | | |
| | | | | oxidoreductases | | | | |
| HAPUA06 | 934457 | 53 | blastx.14 | predicted using | gi\|3874246\|emb\|CA | 58% | 228 | 299 |
| | | | | Genefinder; similar to | A94116.1\| | 72% | 361 | 393 |
| | | | | Zinc finger, 1 | | 77% | 401 | 427 |
| | | | | [Caenorhabditis elegans] | | 46% | 3 | 41 |
| HAPRB02 | 919555 | 72 | blastx.14 | (AF110522) two pore | gi\|4768617\|gb\|AAD | 77% | 345 | 199 |
| | | | | domain K+ channel | 29578.1\|AF110522_{—} | | | |
| | | | | subunit A [Homo | 1 | | | |
| | | | | sapiens] | | | | |

[0057] Table 2 further characterizes certain encoded polypeptides of the invention, by providing the results of comparisons to protein and protein family databases. The first column provides a unique clone identifier, “Clone ID NO:”, corresponding to a cDNA clone disclosed in Table 1A. The second column provides the unique contig indentifier, “Contig ID:” which allows correlation with the information in Table 1A. The third column provides the sequence identifier, “SEQ ID NO:X”, for the contig polynucleotide sequences. The fourth column provides the analysis method by which the homology/identity disclosed in the row was determined. The fifth column provides a description of PFam/NR hits having significant matches identified by each analysis. Column six provides the accession number of the PFam/NR hit disclosed in the fifth column. Column seven, “Score/Percent Identity”, provides a quality score or the percent identity, of the hit disclosed in column five. Comparisons were made between polypeptides encoded by polynucleotides of the invention and a non-redundant protein database (herein referred to as “NR”), or a database of protein families (herein referred to as “PFam”), as described below.

[0058] The NR database, which comprises the NBRF PIR database, the NCBI GenPept database, and the S1B SwissProt and TrEMBL databases, was made non-redundant using the computer program nrdb2 (Warren Gish, Washington University in Saint Louis). Each of the polynucleotides shown in Table 1A, column 3 (e.g., SEQ ID NO:X or the ‘Query’ sequence) was used to search against the NR database. The computer program BLASTX was used to compare a 6-frame translation of the Query sequence to the NR database (for information about the BLASTX algorithm please see Altshul et al., J. Mol. Biol. 215:403-410 (1990), and Gish et al., Nat. Genet. 3:266-272 (1993)). A description of the sequence that is most similar to the Query sequence (the highest scoring ‘Subject’) is shown in column five of Table 2 and the database accession number for that sequence is provided in column six. The highest scoring ‘Subject’ is reported in Table 2 if (a) the estimated probability that the match occurred by chance alone is less than 1.0e-07, and (b) the match was not to a known repetitive element. BLASTX returns alignments of short polypeptide segments of the Query and Subject sequences which share a high degree of similarity; these segments are known as High-Scoring Segment Pairs or HSPs. Table 2 reports the degree of similarity between the Query and the Subject for each HSP as a percent identity in Column 7. The percent identity is determined by dividing the number of exact matches between the two aligned sequences in the HSP, dividing by the number of Query amino acids in the HSP and multiplying by 100. The polynucleotides of SEQ ID NO:X which encode the polypeptide sequence that generates an HSP are delineated by columns 8 and 9 of Table 2.

[0059] The PFam database, PFam version 5.2, (Sonnhammer et al., Nucl. Acids Res., 26:320-322, (1998)) consists of a series of multiple sequence alignments; one alignment for each protein family. Each multiple sequence alignment is converted into a probability model called a Hidden Markov Model, or HMM, that represents the position-specific variation among the sequences that make up the multiple sequence alignment (see, e.g., R. Durbin et al., Biological sequence analysis: probabilistic models of proteins and nucleic acids, Cambridge University Press, 1998 for the theory of HMMs). The program HMMER version 1.8 (Sean Eddy, Washington University in Saint Louis) was used to compare the predicted protein sequence for each Query sequence (SEQ ID NO:Y in Table 1A) to each of the HMMs derived from PFam version 5.2. A HMM derived from PFam version 5.2 was said to be a significant match to a polypeptide of the invention if the score returned by HMMER 1.8 was greater than 0.8 times the HMMER 1.8 score obtained with the most distantly related known member of that protein family. The description of the PFam family which shares a significant match with a polypeptide of the invention is listed in column 5 of Table 2, and the database accession number of the PFam hit is provided in column 6. Column 7 provides the score returned by HMMER version 1.8 for the alignment. Columns 8 and 9 delineate the polynucleotides of SEQ ID NO:X which encode the polypeptide sequence which shows a significant match to a PFam protein family.

[0060] As mentioned, columns 8 and 9 in Table 2, “NT From” and “NT To”, delineate the polynucleotides of “SEQ ID NO:X” that encode a polypeptide having a significant match to the PFam/NR database as disclosed in the fifth column of Table 2. In one embodiment, the invention provides a protein comprising, or alternatively consisting of, a polypeptide encoded by the polynucleotides of SEQ ID NO:X delineated in columns 8 and 9 of Table 2. Also provided are polynucleotides encoding such proteins, and the complementary strand thereto.

[0061] The nucleotide sequence SEQ ID NO:X and the translated SEQ ID NO:Y are sufficiently accurate and otherwise suitable for a variety of uses well known in the art and described further below. For instance, the nucleotide sequences of SEQ ID NO:X are useful for designing nucleic acid hybridization probes that will detect nucleic acid sequences contained in SEQ ID NO:X or the cDNA contained in Clone ID NO:Z. These probes will also hybridize to nucleic acid molecules in biological samples, thereby enabling immediate applications in chromosome mapping, linkage analysis, tissue identification and/or typing, and a variety of forensic and diagnostic methods of the invention. Similarly, polypeptides identified from SEQ ID NO:Y may be used to generate antibodies which bind specifically to these polypeptides, or fragments thereof, and/or to the polypeptides encoded by the cDNA clones identified in, for example, Table 1A.

[0062] Nevertheless, DNA sequences generated by sequencing reactions can contain sequencing errors. The errors exist as misidentified nucleotides, or as insertions or deletions of nucleotides in the generated DNA sequence. The erroneously inserted or deleted nucleotides cause frame shifts in the reading frames of the predicted amino acid sequence. In these cases, the predicted amino acid sequence diverges from the actual amino acid sequence, even though the generated DNA sequence may be greater than 99.9% identical to the actual DNA sequence (for example, one base insertion or deletion in an open reading frame of over 1000 bases).

[0063] Accordingly, for those applications requiring precision in the nucleotide sequence or the amino acid sequence, the present invention provides not only the generated nucleotide sequence identified as SEQ ID NO:X, and a predicted translated amino acid sequence identified as SEQ ID NO:Y, but also a sample of plasmid DNA containing cDNA Clone ID NO:Z (deposited with the ATCC on Oct. 5, 2000, and receiving ATCC designation numbers PTA 2574 and PTA 2575; deposited with the ATCC on Jan. 5, 2001, having the depositor reference numbers TS-1, TS-2, AC-1, and AC-2; and/or as set forth, for example, in Table 1A, 6 and 7). The nucleotide sequence of each deposited clone can readily be determined by sequencing the deposited clone in accordance with known methods. Further, techniques known in the art can be used to verify the nucleotide sequences of SEQ ID NO:X.

[0064] The predicted amino acid sequence can then be verified from such deposits. Moreover, the amino acid sequence of the protein encoded by a particular clone can also be directly determined by peptide sequencing or by expressing the protein in a suitable host cell containing the deposited human cDNA, collecting the protein, and determining its sequence.

[0065] RACE Protocol For Recovery of Full-Length Genes

[0066] Partial cDNA clones can be made full-length by utilizing the rapid amplification of cDNA ends (RACE) procedure described in Frohman, M. A., et al., Proc. Nat'l. Acad. Sci. USA, 85:8998-9002 (1988). A cDNA clone missing either the 5′ or 3′ end can be reconstructed to include the absent base pairs extending to the translational start or stop codon, respectively. In some cases, cDNAs are missing the start codon of translation. The following briefly describes a modification of this original 5′ RACE procedure. Poly A+ or total RNA is reverse transcribed with Superscript II (Gibco/BRL) and an antisense or complementary primer specific to the cDNA sequence. The primer is removed from the reaction with a Microcon Concentrator (Amicon). The first-strand cDNA is then tailed with dATP and terminal deoxynucleotide transferase (Gibco/BRL). Thus, an anchor sequence is produced which is needed for PCR amplification. The second strand is synthesized from the dA-tail in PCR buffer, Taq DNA polymerase (Perkin-Elmer Cetus), an oligo-dT primer containing three adjacent restriction sites (XhoI, SalI and ClaI) at the 5′ end and a primer containing just these restriction sites. This double-stranded cDNA is PCR amplified for 40 cycles with the same primers as well as a nested cDNA-specific antisense primer. The PCR products are size-separated on an ethidium bromide-agarose gel and the region of gel containing cDNA products the predicted size of missing protein-coding DNA is removed. cDNA is purified from the agarose with the Magic PCR Prep kit (Promega), restriction digested with XhoI or SalI, and ligated to a plasmid such as pBluescript SKII (Stratagene) at XhoI and EcoRV sites. This DNA is transformed into bacteria and the plasmid clones sequenced to identify the correct protein-coding inserts. Correct 5′ ends are confirmed by comparing this sequence with the putatively identified homologue and overlap with the partial cDNA clone. Similar methods known in the art and/or commercial kits are used to amplify and recover 3′ ends.

[0067] Several quality-controlled kits are commercially available for purchase. Similar reagents and methods to those above are supplied in kit form from Gibco/BRL for both 5′ and 3′ RACE for recovery of full length genes. A second kit is available from Clontech which is a modification of a related technique, SLIC (single-stranded ligation to single-stranded cDNA), developed by Dumas et al., Nucleic Acids Res., 19:5227-32 (1991). The major differences in procedure are that the RNA is alkaline hydrolyzed after reverse transcription and RNA ligase is used to join a restriction site-containing anchor primer to the first-strand cDNA. This obviates the necessity for the dA-tailing reaction which results in a polyT stretch that is difficult to sequence past.

[0068] An alternative to generating 5′ or 3° cDNA from RNA is to use cDNA library double-stranded DNA. An asymmetric PCR-amplified antisense cDNA strand is synthesized with an antisense cDNA-specific primer and a plasmid-anchored primer. These primers are removed and a symmetric PCR reaction is performed with a nested cDNA-specific antisense primer and the plasmid-anchored primer.

[0069] RNA Ligase Protocol for Generating the 5′ or 3′ End Sequences to Obtain Full Length Genes

[0070] Once a gene of interest is identified, several methods are available for the identification of the 5′ or 3′ portions of the gene which may not be present in the original cDNA plasmid. These methods include, but are not limited to, filter probing, clone enrichment using specific probes and protocols similar and identical to 5′ and 3′ RACE. While the full length gene may be present in the library and can be identified by probing, a useful method for generating the 5′ or 3′ end is to use the existing sequence information from the original cDNA to generate the missing information. A method similar to 5′ RACE is available for generating the missing 5′ end of a desired full-length gene. (This method was published by Fromont-Racine et al., Nucleic Acids Res., 21(7):1683-1684 (1993)). Briefly, a specific RNA oligonucleotide is ligated to the 5′ ends of a population of RNA presumably containing full-length gene RNA transcript. A primer set containing a primer specific to the ligated RNA oligonucleotide and a primer specific to a known sequence of the gene of interest, is used to PCR amplify the 5′ portion of the desired full length gene which may then be sequenced and used to generate the full length gene. This method starts with total RNA isolated from the desired source, poly A RNA may be used but is not a prerequisite for this procedure. The RNA preparation may then be treated with phosphatase if necessary to eliminate 5′ phosphate groups on degraded or damaged RNA, which may interfere with the later RNA ligase step. The phosphatase, if used, is then inactivated and the RNA is treated with tobacco acid pyrophosphatase in order to remove the cap structure present at the 5′ ends of messenger RNAs. This reaction leaves a 5′ phosphate group at the 5′ end of the cap cleaved RNA which can then be ligated to an RNA oligonucleotide using T4 RNA ligase. This modified RNA preparation can then be used as a template for first strand cDNA synthesis using a gene specific oligonucleotide. The first strand synthesis reaction can then be used as a template for PCR amplification of the desired 5′ end using a primer specific to the ligated RNA oligonucleotide and a primer specific to the known sequence of the lung antigen of interest. The resultant product is then sequenced and analyzed to confirm that the 5′ end sequence belongs to the relevant lung antigen.

[0071] The present invention also relates to vectors or plasmids, which include such DNA sequences, as well as the use of the DNA sequences. The material deposited with the ATCC (deposited with the ATCC on Oct. 5, 2000, and receiving ATCC designation numbers PTA 2574 and PTA 2575; deposited with the ATCC on Jan. 5, 2001, having the depositor reference numbers TS-1, TS-2, AC-1, and AC-2; and/or as set forth, for example, in Table 1A, 6 and 7) is a mixture of cDNA clones derived from a variety of human tissue and cloned in either a plasmid vector or a phage vector, as shown, for example, in Table 7. These deposits are referred to as “the deposits” herein. The tissues from which some of the clones were derived are listed in Table 7, and the vector in which the corresponding cDNA is contained is also indicated in Table 7. The deposited material includes cDNA clones corresponding to SEQ ID NO:X described, for example, in Table 1A (Clone ID NO:Z). A clone which is isolatable from the ATCC Deposits by use of a sequence listed as SEQ ID NO:X, may include the entire coding region of a human gene or in other cases such clone may include a substantial portion of the coding region of a human gene. Furthermore, although the sequence listing may in some instances list only a portion of the DNA sequence in a clone included in the ATCC Deposits, it is well within the ability of one skilled in the art to sequence the DNA included in a clone contained in the ATCC Deposits by use of a sequence (or portion thereof) described in, for example Tables 1A or 2 by procedures hereinafter further described, and others apparent to those skilled in the art.

[0072] Also provided in Table 7 is the name of the vector which contains the cDNA clone. Each vector is routinely used in the art. The following additional information is provided for convenience.

[0073] Vectors Lambda Zap (U.S. Pat. Nos. 5,128,256 and 5,286,636), Uni-Zap XR (U.S. Pat. Nos. 5,128,256 and 5,286,636), Zap Express (U.S. Pat. Nos. 5,128,256 and 5,286,636), pBluescript (pBS) (Short, J. M. et al., Nucleic Acids Res. 16:7583-7600 (1988); Alting-Mees, M. A. and Short, J. M., Nucleic Acids Res. 17:9494 (1989)) and pBK (Alting-Mees, M. A. et al., Strategies 5:58-61 (1992)) are commercially available from Stratagene Cloning Systems, Inc., 11011 N. Torrey Pines Road, La Jolla, Calif., 92037. pBS contains an ampicillin resistance gene and pBK contains a neomycin resistance gene. Phagemid pBS may be excised from the Lambda Zap and Uni-Zap XR vectors, and phagemid pBK may be excised from the Zap Express vector. Both phagemids may be transformed into E. coli strain XL-1 Blue, also available from Stratagene.

[0074] Vectors pSport1, pCMVSport 1.0, pCMVSport 2.0 and pCMVSport 3.0, were obtained from Life Technologies, Inc., P. O. Box 6009, Gaithersburg, Md. 20897. All Sport vectors contain an ampicillin resistance gene and may be transformed into E. coli strain DH10B, also available from Life Technologies. See, for instance, Gruber, C. E., et al., Focus 15:59- (1993). Vector lafmid BA (Bento Soares, Columbia University, New York, N.Y.) contains an ampicillin resistance gene and can be transformed into E. coli strain XL-1 Blue. Vector pCR2.1, which is available from Invitrogen, 1600 Faraday Avenue, Carlsbad, Calif. 92008, contains an ampicillin resistance gene and may be transformed into E. coli strain DH10B, available from Life Technologies. See, for instance, Clark, J. M., Nuc. Acids Res. 16:9677-9686 (1988) and Mead, D. et al., Bio/Technology 9: (1991).

[0075] The present invention also relates to the genes corresponding to SEQ ID NO:X, SEQ ID NO:Y, and/or the deposited clone (Clone ID NO:Z). The corresponding gene can be isolated in accordance with known methods using the sequence information disclosed herein. Such methods include preparing probes or primers from the disclosed sequence and identifying or amplifying the corresponding gene from appropriate sources of genomic material.

[0076] Also provided in the present invention are allelic variants, orthologs, and/or species homologs. Procedures known in the art can be used to obtain full-length genes, allelic variants, splice variants, full-length coding portions, orthologs, and/or species homologs of lung associated genes corresponding to SEQ ID NO:X or the complement thereof, polypeptides encoded by SEQ ID NO:X or the complement thereof, and/or the cDNA contained in Clone ID NO:Z, using information from the sequences disclosed herein or the clones deposited with the ATCC. For example, allelic variants and/or species homologs may be isolated and identified by making suitable probes or primers from the sequences provided herein and screening a suitable nucleic acid source for allelic variants and/or the desired homologue.

[0077] The polypeptides of the invention can be prepared in any suitable manner. Such polypeptides include isolated naturally occurring polypeptides, recombinantly produced polypeptides, synthetically produced polypeptides, or polypeptides produced by a combination of these methods. Means for preparing such polypeptides are well understood in the art.

[0078] The polypeptides may be in the form of the secreted protein, including the mature form, or may be a part of a larger protein, such as a fusion protein (see below). It is often advantageous to include an additional amino acid sequence which contains secretory or leader sequences, pro-sequences, sequences which aid in purification, such as multiple histidine residues, or an additional sequence for stability during recombinant production.

[0079] The polypeptides of the present invention are preferably provided in an isolated form, and preferably are substantially purified. A recombinantly produced version of a polypeptide, including the secreted polypeptide, can be substantially purified using techniques described herein or otherwise known in the art, such as, for example, by the one-step method described in Smith and Johnson, Gene 67:31-40 (1988). Polypeptides of the invention also can be purified from natural, synthetic or recombinant sources using techniques described herein or otherwise known in the art, such as, for example, antibodies of the invention raised against the lung polypeptides of the present invention in methods which are well known in the art.

[0080] The present invention provides a polynucleotide comprising, or alternatively consisting of, the nucleic acid sequence of SEQ ID NO:X, and/or the cDNA sequence contained in Clone ID NO:Z. The present invention also provides a polypeptide comprising, or alternatively, consisting of, the polypeptide sequence of SEQ ID NO:Y, a polypeptide encoded by SEQ ID NO:X or a complement thereof, a polypeptide encoded by the cDNA contained in Clone ID NO:Z, and/or the polypeptide sequence encoded by a nucleotide sequence in SEQ ID NO:B as defined in column 6 of Table 1B. Polynucleotides encoding a polypeptide comprising, or alternatively consisting of the polypeptide sequence of SEQ ID NO:Y, a polypeptide encoded by SEQ ID NO:X, a polypeptide encoded by the cDNA contained in Clone ID NO:Z and/or a polypeptide sequence encoded by a nucleotide sequence in SEQ ID NO:B as defined in column 6 of Table 1B are also encompassed by the invention. The present invention further encompasses a polynucleotide comprising, or alternatively consisting of, the complement of the nucleic acid sequence of SEQ ID NO:X, a nucleic acid sequence encoding a polypeptide encoded by the complement of the nucleic acid sequence of SEQ ID NO:X, and/or the cDNA contained in Clone ID NO:Z.

[0081] Moreover, representative examples of polynucleotides of the invention comprise, or alternatively consist of, one, two, three, four, five, six, seven, eight, nine, ten, or more of the sequences delineated in Table 1B column 6, or any combination thereof. Additional, representative examples of polynucleotides of the invention comprise, or alternatively consist of, one, two, three, four, five, six, seven, eight, nine, ten, or more of the complementary strand(s) of the sequences delineated in Table 1B column 6, or any combination thereof. In further embodiments, the above-described polynucleotides of the invention comprise, or alternatively consist of, sequences delineated in Table 1B, column 6, and have a nucleic acid sequence which is different from that of the BAC fragment having the sequence disclosed in SEQ ID NO:B (see Table 1B, column 5). In additional embodiments, the above-described polynucleotides of the invention comprise, or alternatively consist of, sequences delineated in Table 1B, column 6, and have a nucleic acid sequence which is different from that published for the BAC clone identified as BAC ID NO:A (see Table 1B, column 4). In additional embodiments, the above-described polynucleotides of the invention comprise, or alternatively consist of, sequences delineated in Table 1B, column 6, and have a nucleic acid sequence which is different from that contained in the BAC clone identified as BAC ID NO:A (see Table 1B, column 4). Polypeptides encoded by these polynucleotides, other polynucleotides that encode these polypeptides, and antibodies that bind these polypeptides are also encompassed by the invention. Additionally, fragments and variants of the above-described polynucleotides and polypeptides are also encompassed by the invention.

[0082] Further, representative examples of polynucleotides of the invention comprise, or alternatively consist of, one, two, three, four, five, six, seven, eight, nine, ten, or more of the sequences delineated in column 6 of Table 1B which correspond to the same Clone ID NO:Z (see Table 1B, column 1), or any combination thereof. Additional, representative examples of polynucleotides of the invention comprise, or alternatively consist of, one, two, three, four, five, six, seven, eight, nine, ten, or more of the complementary strand(s) of the sequences delineated in column 6 of Table 1B which correspond to the same Clone ID NO:Z (see Table 1B, column 1), or any combination thereof. In further embodiments, the above-described polynucleotides of the invention comprise, or alternatively consist of, sequences delineated in column 6 of Table 1B which correspond to the same Clone ID NO:Z (see Table 1B, column 1) and have a nucleic acid sequence which is different from that of the BAC fragment having the sequence disclosed in SEQ ID NO:B (see Table 1B, column 5). In additional embodiments, the above-described polynucleotides of the invention comprise, or alternatively consist of, sequences delineated in column 6 of Table 1B which correspond to the same Clone ID NO:Z (see Table 1B, column 1) and have a nucleic acid sequence which is different from that published for the BAC clone identified as BAC ID NO:A (see Table 1B, column 4). In additional embodiments, the above-described polynucleotides of the invention comprise, or alternatively consist of, sequences delineated in column 6 of Table 1B which correspond to the same Clone ID NO:Z (see Table 1B, column 1) and have a nucleic acid sequence which is different from that contained in the BAC clone identified as BAC ID NO:A (see Table 1B, column 4). Polypeptides encoded by these polynucleotides, other polynucleotides that encode these polypeptides, and antibodies that bind these polypeptides are also encompassed by the invention. Additionally, fragments and variants of the above-described polynucleotides and polypeptides are also encompassed by the invention.

[0083] Further, representative examples of polynucleotides of the invention comprise, or alternatively consist of, one, two, three, four, five, six, seven, eight, nine, ten, or more of the sequences delineated in column 6 of Table 1B which correspond to the same contig sequence identifer SEQ ID NO:X (see Table 1B, column 2), or any combination thereof. Additional, representative examples of polynucleotides of the invention comprise, or alternatively consist of, one, two, three, four, five, six, seven, eight, nine, ten, or more of the complementary strand(s) of the sequences delineated in column 6 of Table 1B which correspond to the same contig sequence identifer SEQ ID NO:X (see Table 1B, column 2), or any combination thereof. In further embodiments, the above-described polynucleotides of the invention comprise, or alternatively consist of, sequences delineated in column 6 of Table 1B which correspond to the same contig sequence identifer SEQ ID NO:X (see Table 1B, column 2) and have a nucleic acid sequence which is different from that of the BAC fragment having the sequence disclosed in SEQ ID NO:B (see Table 1B, column 5). In additional embodiments, the above-described polynucleotides of the invention comprise, or alternatively consist of, sequences delineated in column 6 of Table 1B which correspond to the same contig sequence identifer SEQ ID NO:X (see Table 1B, column 2) and have a nucleic acid sequence which is different from that published for the BAC clone identified as BAC ID NO:A (see Table 1B, column 4). In additional embodiments, the above-described polynucleotides of the invention comprise, or alternatively consist of, sequences delineated in column 6 of Table 1B which correspond to the same contig sequence identifer SEQ ID NO:X (see Table 1B, column 2) and have a nucleic acid sequence which is different from that contained in the BAC clone identified as BAC ID NO:A (See Table 1B, column 4). Polypeptides encoded by these polynucleotides, other polynucleotides that encode these polypeptides, and antibodies that bind these polypeptides are also encompassed by the invention. Additionally, fragments and variants of the above-described polynucleotides and polypeptides are also encompassed by the invention.

[0084] Moreover, representative examples of polynucleotides of the invention comprise, or alternatively consist of, one, two, three, four, five, six, seven, eight, nine, ten, or more of the sequences delineated in the same row of Table 1B column 6, or any combination thereof. Additional, representative examples of polynucleotides of the invention comprise, or alternatively consist of, one, two, three, four, five, six, seven, eight, nine, ten, or more of the complementary strand(s) of the sequences delineated in the same row of Table 1B column 6, or any combination thereof. In preferred embodiments, the polynucleotides of the invention comprise, or alternatively consist of, one, two, three, four, five, six, seven, eight, nine, ten, or more of the complementary strand(s) of the sequences delineated in the same row of Table 1B column 6, wherein sequentially delineated sequences in the table (i.e. corresponding to those exons located closest to each other) are directly contiguous in a 5′ to 3′ orientation. In further embodiments, above-described polynucleotides of the invention comprise, or alternatively consist of, sequences delineated in the same row of Table 1B, column 6, and have a nucleic acid sequence which is different from that of the BAC fragment having the sequence disclosed in SEQ ID NO:B (see Table 1B, column 5). In additional embodiments, the above-described polynucleotides of the invention comprise, or alternatively consist of, sequences delineated in the same row of Table 1B, column 6, and have a nucleic acid sequence which is different from that published for the BAC clone identified as BAC ID NO:A (see Table 1B, column 4). In additional embodiments, the above-described polynucleotides of the invention comprise, or alternatively consist of, sequences delineated in the same row of Table 1B, column 6, and have a nucleic acid sequence which is different from that contained in the BAC clone identified as BAC ID NO:A (see Table 1B, column 4). Polypeptides encoded by these polynucleotides, other polynucleotides that encode these polypeptides, and antibodies that bind these polypeptides are also encompassed by the invention.

[0085] In additional specific embodiments, polynucleotides of the invention comprise, or alternatively consist of, one, two, three, four, five, six, seven, eight, nine, ten, or more of the sequences delineated in column 6 of Table 1B, and the polynucleotide sequence of SEQ ID NO:X (e.g., as defined in Table 1B, column 2) or fragments or variants thereof. Polypeptides encoded by these polynucleotides, other polynucleotides that encode these polypeptides, and antibodies that bind these polypeptides are also encompassed by the invention.

[0086] In additional specific embodiments, polynucleotides of the invention comprise, or alternatively consist of, one, two, three, four, five, six, seven, eight, nine, ten, or more of the sequences delineated in column 6 of Table 1B which correspond to the same Clone ID NO:Z (see Table 1B, column 1), and the polynucleotide sequence of SEQ ID NO:X (e.g., as defined in Table 1A or 1B) or fragments or variants thereof. In preferred embodiments, the delineated sequence(s) and polynucleotide sequence of SEQ ID NO:X correspond to the same Clone ID NO:Z. Polypeptides encoded by these polynucleotides, other polynucleotides that encode these polypeptides, and antibodies that bind these polypeptides are also encompassed by the invention.

[0087] In further specific embodiments, polynucleotides of the invention comprise, or alternatively consist of, one, two, three, four, five, six, seven, eight, nine, ten, or more of the sequences delineated in the same row of column 6 of Table 1B, and the polynucleotide sequence of SEQ ID NO:X (e.g., as defined in Table 1A or 1B) or fragments or variants thereof. In preferred embodiments, the delineated sequence(s) and polynucleotide sequence of SEQ ID NO:X correspond to the same row of column 6 of Table 1B. Polypeptides encoded by these polynucleotides, other polynucleotides that encode these polypeptides, and antibodies that bind these polypeptides are also encompassed by the invention.

[0088] In additional specific embodiments, polynucleotides of the invention comprise, or alternatively consist of a polynucleotide sequence in which the 3′ 10 polynucleotides of one of the sequences delineated in column 6 of Table 1B and the 5′ 10 polynucleotides of the sequence of SEQ ID NO:X are directly contiguous. Nucleic acids which hybridize to the complement of these 20 contiguous polynucleotides under stringent hybridization conditions or alternatively, under lower stringency conditions, are also encompassed by the invention. Polypeptides encoded by these polynucleotides and/or nucleic acids, other polynucleotides and/or nucleic acids that encode these polypeptides, and antibodies that bind these polypeptides are also encompassed by the invention. Additionally, fragments and variants of the above-described polynucleotides, nucleic acids, and polypeptides are also encompassed by the invention.

[0089] In additional specific embodiments, polynucleotides of the invention comprise, or alternatively consist of, a polynucleotide sequence in which the 3′ 10 polynucleotides of one of the sequences delineated in column 6 of Table 1B and the 5′ 10 polynucleotides of a fragment or variant of the sequence of SEQ ID NO:X are directly contiguous Nucleic acids which hybridize to the complement of these 20 contiguous polynucleotides under stringent hybridization conditions or alternatively, under lower stringency conditions, are also encompassed by the invention. Polypeptides encoded by these polynucleotides and/or nucleic acids, other polynucleotides and/or nucleic acids encoding these polypeptides, and antibodies that bind these polypeptides are also encompassed by the invention. Additionally, fragments and variants of the above-described polynucleotides, nucleic acids, and polypeptides are also encompassed by the invention.

[0090] In specific embodiments, polynucleotides of the invention comprise, or alternatively consist of, a polynucleotide sequence in which the 3′ 10 polynucleotides of the sequence of SEQ ID NO:X and the 5′ 10 polynucleotides of the sequence of one of the sequences delineated in column 6 of Table 1B are directly contiguous. Nucleic acids which hybridize to the complement of these 20 contiguous polynucleotides under stringent hybridization conditions or alternatively, under lower stringency conditions, are also encompassed by the invention. Polypeptides encoded by these polynucleotides and/or nucleic acids, other polynucleotides and/or nucleic acids encoding these polypeptides, and antibodies that bind these polypeptides are also encompassed by the invention. Additionally, fragments and variants of the above-described polynucleotides, nucleic acids, and polypeptides are also encompassed by the invention.

[0091] In specific embodiments, polynucleotides of the invention comprise, or alternatively consist of, a polynucleotide sequence in which the 3′ 10 polynucleotides of a fragment or variant of the sequence of SEQ ID NO:X and the 5′ 10 polynucleotides of the sequence of one of the sequences delineated in column 6 of Table 1B are directly contiguous. Nucleic acids which hybridize to the complement of these 20 contiguous polynucleotides under stringent hybridization conditions or alternatively, under lower stringency conditions, are also encompassed by the invention. Polypeptides encoded by these polynucleotides and/or nucleic acids, other polynucleotides and/or nucleic acids encoding these polypeptides, and antibodies that bind these polypeptides are also encompassed by the invention. Additionally, fragments and variants of the above-described polynucleotides, nucleic acids, and polypeptides, are also encompassed by the invention.

[0092] In further specific embodiments, polynucleotides of the invention comprise, or alternatively consist of, a polynucleotide sequence in which the 3′ 10 polynucleotides of one of the sequences delineated in column 6 of Table 1B and the 5′ 10 polynucleotides of another sequence in column 6 are directly contiguous. Nucleic acids, which hybridize to the complement of these 20 contiguous polynucleotides under stringent hybridization conditions or alternatively, under lower stringency conditions, are also encompassed by the invention. Polypeptides encoded by these polynucleotides and/or nucleic acids, other polynucleotides and/or nucleic acids encoding these polypeptides, and antibodies that bind these polypeptides are also encompassed by the invention. Additionally, fragments and variants of the above-described polynucleotides, nucleic acids, and polypeptides are also encompassed by the invention.

[0093] In specific embodiments, polynucleotides of the invention comprise, or alternatively consist of, a polynucleotide sequence in which the 3′ 10 polynucleotides of one of the sequences delineated in column 6 of Table 1B and the 5′ 10 polynucleotides of another sequence in column 6 corresponding to the same Clone ID NO:Z (see Table 1B, column 1) are directly contiguous. Nucleic acids which hybridize to the complement of these 20 lower stringency conditions, are also encompassed by the invention. Polypeptides encoded by these polynucleotides and/or nucleic acids, other polynucleotides and/or nucleic acids encoding these polypeptides, and antibodies that bind these polypeptides are also encompassed by the invention. Additionally, fragments and variants of the above-described polynucleotides, nucleic acids, and polypeptides are also encompassed by the invention.

[0094] In specific embodiments, polynucleotides of the invention comprise, or alternatively consist of, a polynucleotide sequence in which the 3′ 10 polynucleotides of one sequence in column 6 corresponding to the same contig sequence identifer SEQ ID NO:X (see Table 1B, column 2) are directly contiguous. Nucleic acids which hybridize to the complement of these 20 contiguous polynucleotides under stringent hybridization conditions or alternatively, under lower stringency conditions, are also encompassed by the invention. Polypeptides encoded by these polynucleotides and/or nucleic acids, other polynucleotides and/or nucleic acids encoding these polypeptides, and antibodies that bind these polypeptides are also encompassed by the invention. Additionally, fragments and variants of the above-described polynucleotides, nucleic acids, and polypeptides are also encompassed by the invention.

[0095] In specific embodiments, polynucleotides of the invention comprise, or alternatively consist of a polynucleotide sequence in which the 3′ 10 polynucleotides of one of the sequences delineated in column 6 of Table 1B and the 5′ 10 polynucleotides of another sequence in column 6 corresponding to the same row are directly contiguous. In preferred embodiments, the 3′ 10 polynucleotides of one of the sequences delineated in column 6 of Table 1B is directly contiguous with the 5′ 10 polynucleotides of the next sequential exon delineated in Table 1B, column 6. Nucleic acids which hybridize to the complement of these 20 contiguous polynucleotides under stringent hybridization conditions or alternatively, under lower stringency conditions, are also encompassed by the invention. Polypeptides encoded by these polynucleotides and/or nucleic acids, other polynucleotides and/or nucleic acids encoding these polypeptides, and antibodies that bind these polypeptides are also encompassed by the invention. Additionally, fragments and variants of the above-described polynucleotides, nucleic acids, and polypeptides are also encompassed by the invention.

[0096] Many polynucleotide sequences, such as EST sequences, are publicly available and accessible through sequence databases and may have been publicly available prior to conception of the present invention. Preferably, such related polynucleotides are specifically excluded from the scope of the present invention. Accordingly, for each contig sequence (SEQ ID NO:X) listed in the third column of Table 1A, preferably excluded are one or more polynucleotides comprising a nucleotide sequence described by the general formula of a-b, where a is any integer between 1 and the final nucleotide minus 15 of SEQ ID NO:X, b is an integer of 15 to the final nucleotide of SEQ ID NO:X, where both a and b correspond to the positions of nucleotide residues shown in SEQ ID NO:X, and where b is greater than or equal to a+14. More specifically, preferably excluded are one or more polynucleotides comprising a nucleotide sequence described by the general formula of a-b, where a and b are integers as defined in columns 4 and 5, respectively, of Table 3. In specific embodiments, the polynucleotides of the invention do not consist of at least one, two, three, four, five, ten, or more of the specific polynucleotide sequences referenced by the Genbank Accession No. as disclosed in column 6 of Table 3 (including for example, published sequence in connection with a particular BAC clone). In further embodiments, preferably excluded from the invention are the specific polynucleotide sequence(s) contained in the clones corresponding to at least one, two, three, four, five, ten, or more of the available material having the accession numbers identified in the sixth column of this Table (including for example, the actual sequence contained in an identified BAC clone). In no way is this listing meant to encompass all of the sequences which may be excluded by the general formula, it is just a representative example. All references available through these accessions are hereby incorporated by reference in their entirety.

TABLE 3

| Clone ID | SEQ ID | Contig | EST Disclaimer | | |
|---|---|---|---|---|---|
| NO:Z | NO:X | ID: | Range of a | Range of b | Accession #'s |
| HAPAC39 | 11 | 848724 | 1-300 | 15-314 | AA315247, AC003046, and AC005859. |
| HAPAM75 | 12 | 509745 | 1-256 | 115-270 | AA314889. |
| HAPBT59 | 13 | 739607 | 1-356 | 15-370 | AA077424, H64461, AL044889, AA077969, AA077598, AA077489, |
| HAPBU51 | 14 | 724824 | 1-255 | 15-269 | AA554164, AC002536, AC007363, AP000074, A1011932, AP000219, |
| HAPBU55 | 15 | 732487 | 1-323 | 15-337 | |
| HAPNM31 | 16 | 881916 | 1-413 | 15-427 | AW243419, A1569777, and A1934355. |
| HAPNQ48 | 17 | 587302 | 1-303 | 15-317 | E00248, 102247, A35397, A15895, E04900, E03059, E03058, A35400, E03057, |
| HAPNR68 | 18 | 848699 | 1-461 | 15-475 | |
| HAPNZ11 | 19 | 966780 | 1-452 | 15-466 | AC009510. |
| HAPOK85 | 20 | 848692 | 1-234 | 15-248 | |
| HAPON27 | 21 | 701741 | 1-418 | 15-432 | AA702479, A1660878, AA702790, AW190166, AW075860, AA825557, |
| | | | | | A1472346, A1458143, A1038962, AA037682, AA505372, AA864908, |
| | | | | | AI051720, AA610492, A1567560, AA505567, AA505703, AA505302, |
| | | | | | AA704244, A1911095, A1394052, A1243830, AA505301, A1951150, |
| | | | | | AA664420, A1015179, A1076191, AA147170, AA814618, A1808905, |
| | | | | | A1393219, T35671, H15525, Z40775, AA321331, AA633691, A1025182, |
| | | | | | H11751, A1865928, H11079, AW274781, AA011610, A1349356, AA705344, |
| | | | | | T65428, AL046658, F09480, AW078984, AW235751, AA811013, AL045418, |
| | | | | | and AB014525. |
| HAPOX59 | 22 | 587526 | 1-355 | 15-369 | A1911993, A1915306, AW192733, AA643898, AA421798, Z30130, AA128053, |
| | | | | | AW083733, AA082216, and AC007655. |
| HAPPX64 | 23 | 786559 | 1-425 | 15-439 | A1953377, AW271552, AW242477, A1796273, AW300150, AA301578, |
| | | | | | AA321688, AA480848, AA455191, W07271, A1580708, N51132, AW361091, |
| | | | | | M78229, W40335, and A52230. |
| HAPSG03 | 24 | 923690 | 1-524 | 15-538 | N77998, and Z83307. |
| HAPSP70 | 25 | 720687 | 1-402 | 15-416 | AA317106, and AL096772. |
| HAPSQ88 | 26 | 847529 | 1-491 | 15-505 | AL022324. |
| HAPSR74 | 27 | 952336 | 1-229 | 15-243 | |
| HAPSR91 | 28 | 789579 | 1-661 | 15-675 | |
| HAPST65 | 29 | 864789 | 1-504 | 15-518 | |
| HAPSU75 | 30 | 767111 | 1-462 | 15-476 | AC005479. |
| HAPTB92 | 31 | 791015 | 1-287 | 15-301 | A1758121. |
| HAPTL74 | 32 | 765047 | 1-400 | 15-414 | |
| HAPTM40 | 33 | 792192 | 1-498 | 15-512 | AA558366, N25079, R99613, A1889108, H13612, AA236867, AC005089, |
| | | | | | AC005606, AL031228, AD000813, AC009225, AC005031, U80017, |
| | | | | | AC002116, AC005003, AL022163, AD000092, Z98051, AL031668, AL049757, |
| | | | | | AC005015, AF112441, AC005519, AC005225, AC005046, AL022721, |
| | | | | | AL008718, AC007055, AC005301, AL031735, AC007283, AL031678, |
| | | | | | AC004779, AC007151, Z97056, AL049872, AF053356, AF196779, AC004000, |
| | | | | | AL022311, AL132777, AL132987, AL096761, AL049780, AC002465, Z93023, |
| | | | | | AC002350, AL078581, AC006211, AL035086, AC002073, AL031721, |
| | | | | | AP000312, AC004996, AC004013, Z84474, AC006048, AL009181, AC004185, |
| | | | | | AC005932, Z84480, AL031427, AL133448, AC004033, AC005911, AC004686, |
| | | | | | AC005291, AC004812, AC005833, AC007731, AC002477, AC005500, |
| | | | | | AL118516, AL022308, Z98052, D84401, AP000359, AL022313, AC004771, |
| | | | | | AJ010770, AP0D0193, AC002543, AF039906, AC002300, AC001228, |
| | | | | | AP000050, AL133382, AC005538, U95739, AC005616, AP000689, AB003151, |
| | | | | | AL049569, AP000117, AL033392, AL096791, AC007160, AC006388, |
| | | | | | AC004985, AL008710, AP0000O8, AL133163, AL008635, AL035400, |
| | | | | | AC002115, U62317, L78833, AL031587, AC005913, AL031311, AP000704, |
| | | | | | AC003688, U78027, AC006001, AC004998, AC006455, AC005520, |
| | | | | | AL049697, AL033376, Z85986, AC002553, Z77249, AC005527, AC005412, |
| | | | | | AC007388, AC004895, AF172277, AC002395, AC002312, AP000509, |
| | | | | | AP000245, AC010205, AL022312, AF001549, AC004651, AC003965, |
| | | | | | AC007263, AC004257, AC007421, AC005537, AC004134, AL031680, |
| | | | | | AC002310, AL050307, AC005722, AC004560, and AC005288. |
| HAPUA68 | 34 | 954412 | 1-229 | 15-243 | AW016327. |
| HLJBD62 | 35 | 558975 | 1-607 | 15-621 | A1830008, AW027300, A1492254, A1963362, AA910855, A1826880, |
| | | | | | AA704060, AA962722, A1381989, A1888784, AA600008, AW014543, |
| | | | | | A1244281, A1372076, AA908880, A1984161, R60753, AA688028, AA602732, |
| | | | | | N45372, A1279783, AA256789, AA406536, A1435974, AA918507, A1000917, |
| | | | | | AA782466, A1079275, A1041741, A1192069, A1244633, AA534440, A1828659, |
| | | | | | A1027064, AA533193, A1378913, AA643580, AA113765, W39714, A1201853, |
| | | | | | AA406535, AW074155, AA653022, AA148835, AA977384, W15492, R37489, |
| | | | | | F25462, AA858404, F35723, A1623141, A1125514, C04944, AA255456, |
| | | | | | AA976165, A1282763, N32061, AA532819, N83866, W32346, W02081, |
| | | | | | AA470789, AA55 1855, AW392670, U46346, AW384394, AW363220, |
| | | | | | AL119444, AL119497, AW372827, U46347, U46341, AL119319, AL119443, |
| | | | | | AL119484, AL119457, AL119396, AL119324, Z99396, AL119363, AL119341, |
| | | | | | AL119391, AL119355, U46350, U46351, U46349, AL119335, AL119483, |
| | | | | | AL134528, AL119439, AL119496, U46345, AL134533, AL119522, AL134518, |
| | | | | | AL119399, AL134538, AL134524, AL037205, AL042433, AL042614, |
| | | | | | AL042544, AL119418, AL042450, AL042965, AL042975, AL043003, |
| | | | | | AL042970, AL042542, AL043019, AL042984, AL043029, AL042551, |
| | | | | | AL119464, AL119488, X61100, J02877, AB026436, AR054110, A81671, |
| | | | | | AR060234, AR066494, and AR069079. |
| HLJBE19 | 36 | 953727 | 1-273 | 15-287 | |
| HLJDL84 | 37 | 782823 | 1-469 | 15-483 | A1751162, F13749, F29989, AW162288, AL135643, A1049722, C18763, |
| | | | | | A1598060, A1696793, T29180, AW406755, A1446474, A1365988, AA558298, |
| | | | | | AA501614, AW339687, AA132765, AA482810, A1284640, A1635272, |
| | | | | | AA563770, A1148245, H48546, A1357551, AA323085, A1299050, H65464, |
| | | | | | AA487542, AA148489, AW131034, AA936872, AA730782, H95681, |
| | | | | | AA579184, A1250019, A1370475, R82388, AA507282, AA533408, F17700, |
| | | | | | A1382614, AL037910, AA326410, AA229444, R92404, AA385100, AA843450, |
| | | | | | AL120579, A1800343, W45298, AA321719, AA557686, AL144055, AA847099, |
| | | | | | AA747480, AA099892, W45283, A1358229, AA113186, AW238127, |
| | | | | | AA831388, AL045077, AA644320, A1610644, AA577748, AW024017, |
| | | | | | A1908093, AA132833, R87547, A1859834, AA632960, AA365586, A1291317, |
| | | | | | AW270258, AA235575, AA578853, AA443390, AA601680, AA310879, |
| | | | | | AC002477, AC004216, AC009516, AC006270, AP000557, AC007390, |
| | | | | | AP000556, AP000552, AC007551, AC005755, Z83838, AC005484, AP000509, |
| | | | | | AL034420, AC004933, D84394, AL096701, AC005567, AC004887, AF196971, |
| | | | | | AC006509, AP000356, AL008719, AC004783, AC000015, AC005529, |
| | | | | | AC005007, Z98941, AL031662, AC012599, AR036572, U91328, AC005086, |
| | | | | | AC004253, AL117536, AL031650, AL035427, AC004797, AC006084, |
| | | | | | AL031584, AC005291, Z92546, L44140, AC005378, AL109798, AF001549, |
| | | | | | AL022476, AP000353, AC006597, AL031283, AL031680, AC005412, |
| | | | | | AC004819, Z95116, AC008033, AC005703, AL078639, AC005701, AP000961, |
| | | | | | AC004983, AC006130, AC004019, AL109627, AC005255, AC005913, |
| | | | | | AC002039, AC002350, Z84480, AC005399, AC002425, Y18000, AC004084, |
| | | | | | AC005060, U95742, AC006511, AC005874, AF134471, AC004882, |
| | | | | | AC007216, AC005740, AC006115, AC005954, AL034451, X55448, |
| | | | | | AL035587, AC008071, AF196779, AL034555, AL049869, AC002070, |
| | | | | | AL080243, AC004805, AC006312, AL031120, AC006207, AC002996, |
| | | | | | AL035683, AL031255, AP000096, AC002115, U07563, AP000350, AC002468, |
| | | | | | AC002426, Z83856, Z82214, AC006285, AC006241, AC004644, Z93244, |
| | | | | | AP000432, AP000240, AC005971, L35485, AC004534, AC009509, AC003964, |
| | | | | | AL024498, APOQ00SS, AP000123, AP000170, AC005726, M17262, AC007792, |
| | | | | | AF146367, AL049780, AC006530, AC005562, AL049872, AC008372, |
| | | | | | AC007030, AC005229, AL031053, AP000500, AL031589, AC001643, |
| | | | | | AC006050, AF124523, AC006238, AL121825, AL035658, AL049776, |
| | | | | | AC005081, AF031078, AC004215, AF000573, AB000879, Z84467, AF030876, |
| | | | | | AC006044, AC004491, AC007845, AC007298, AL033527, AC004820, |
| | | | | | AP000114, AC006271, AC004832, AJ011713, AC002404, AL031778, |
| | | | | | AC004890, AC006111, AC003958, Z98884, AC005209, AL023803, AC005480, |
| | | | | | AL031848, U85195, AC016025, AC007237, AF165926, AC005694, U96629, |
| | | | | | Z75407, AC005520, AC004834, AC005159, AP000507, AC007386, AC005327, |
| | | | | | AC004510, Z85987, AC005988, AL121603, AC005764, AC005207, AC005368, |
| | | | | | AE000658, AC004453, AC007537, AC005154, AF011889, AL133396, |
| | | | | | AB000882, AC004921, AL121694, AC002418, AC005940, D83253, |
| | | | | | AC005057, AL133289, AL117339, AC005355, AC009784, AC016027, |
| | | | | | AL049588, AC016830, AL049757, AC005839, AP000030, AF053356, |
| | | | | | AC005785, AC007735, AC005527, AC006257, AL121769, AL022240, |
| | | | | | AC006088, AL031230, AC002420, AC000052, AL136295, AC000119, |
| | | | | | AC004815, AF047825, AC006544, Z97056, AC005808, AC005829, AL132994, |
| | | | | | AC005993, AC006064, AC007993, AC002492, AP000466, AC003667, |
| | | | | | AL049610, AC006076, AC005040, AL022578, and AC007934. |
| HLJDZ49 | 38 | 923476 | 1-422 | 15-436 | AA362688, AA362690, AA362689, T29199, AL044652, A1432644, A1623302, |
| | | | | | A1431312, A1432653, A1432654, AW081103, A1431347, A1431230, A1431328, |
| | | | | | A1431354, A1432655, A1431310, A1432677, A1431337, AW128900, A1431353, |
| | | | | | A1432661, A1492519, A1432675, A1432674, A1432676, A1432651, A1432647, |
| | | | | | A1431254, A1432650, A1431330, A1431248, A1432649, A1431243, A1432672, |
| | | | | | A1432665, A1431255, A1431307, A1431316, A1431346, A1431345, A1432662, |
| | | | | | A1431357, A1791349, A1431351, A1431241, A1432673, A1432658, A1431340, |
| | | | | | A1431238, A1432666, AW128846, A1432664, A1431247, A1432657, A1431235, |
| | | | | | A1492510, A1492520, AW128897, A1431231, A1432643, A1431308, |
| | | | | | AW128884, A1431257, A1431751, A1431323, A1431350, A1431318, A1492509, |
| | | | | | A1431321, A1431315, A1431246, A1432645, AW129223, A1431314, AL042729, |
| | | | | | AL042931, 166498, A49045, A94048, A94061, AR035224, 166495, 166494, |
| | | | | | E01324, 108638, 166497, 166496, 166486, 166487, 109252, 109251, 109270, |
| | | | | | 109268, 109269, 107209, 107249, AR068508, AR068510, AR067734, AR068509, |
| | | | | | A63954, 191969, A49701, A29109, A32111, AR068550, A23373, AR068551, |
| | | | | | A94046, A94054, 158322, 158323, A27169, A27170, A39929, A83151, |
| | | | | | AR067731, AR067732, AR038321, AR038307, 109267, Y17793, AR051528, |
| | | | | | AR051547, AR051537, AR051524, A42964, AF064854, AF019249, and |
| | | | | | AL133019. |
| HNLMB07 | 39 | 951944 | 1-344 | 15-358 | AA513899, N66187, and N99183. |
| HLJEBS3 | 40 | 727924 | 1-679 | 15-693 | N66926, A1292170, N64431, AA704444, N75955, H41215, A1051426, N63244, |
| | | | | | N69201, T99531, T97618, A1279207, H72612, R08835, and H61093. |
| HLJDZ06 | 41 | 934837 | 1-570 | 15-584 | AL638450. |
| HLJDUS6 | 42 | 853274 | 1-610 | 15-624 | A1970788, AW118603, A1653980, A1884393, A1038559, A1803977, AA633580, |
| | | | | | A1299369, A1281374, A1377662, H02873, A1246272, AW058300, N64512, |
| | | | | | AA809261, A1355041, AA526520, H03768, N75621, A1702548, A1245763, |
| | | | | | N22380, D59329, AA452590, H50615, AA302791, A1216182, H50614, |
| | | | | | A1205785, N80300, and AA324459. |
| HLJD065 | 43 | 747587 | 1-560 | 15-574 | A1200538, A1148143, A1699383, A1932366, A1423355, AA047736, A1243302, |
| | | | | | AA746185, AA234674, AA831124, A1359254, A1301539, AA235334, |
| | | | | | AA535117, A1702607, AA047685, and Z57189. |
| HLJD057 | 44 | 734445 | 1-351 | 15-365 | W46341, AA774530, and AA747697. |
| HLJD010 | 45 | 856927 | 1-631 | 15-645 | |
| HLJDN60 | 46 | 740061 | 1-381 | 15-395 | R65885. |
| HLJBR43 | 47 | 948850 | 1-660 | 15-674 | AA398185, T78054, and T79888. |
| HLJBE22 | 48 | 674819 | 1-730 | 15-744 | AA429389, AA425128, AA777471, and H24021. |
| HIDAG10 | 49 | 970518 | 1-622 | 15-636 | R66652. |
| HIDAF76 | 50 | 857563 | 1-870 | 15-884 | AW450198, A1696229, AA233486, and AA169781. |
| HIDAE12 | 51 | 968936 | 1-763 | 15-777 | AA904211, H07953, T74524, A1061313, AA640430, AA483606, A1380617, |
| | | | | | AA570740, AA523695, AA640410, AA169245, AA704393, AA535216, |
| | | | | | AA284247, A1609972, AL042373, AW023111, AA568204, A1687343, |
| | | | | | AA449997, AW270270, A1310464, AW303196, AW274349, A1275982, |
| | | | | | A1612142, A1279417, A1755214, A1270177, AL046519, AA524616, A1358384, |
| | | | | | AW301350, A1754567, A1754105, AA501461, AW277174, AA572813, |
| | | | | | A1962030, AW328331, A1610941, A1306232, A1251576, A1912401, |
| | | | | | AW270768, A1246796, AA630854, A1583466, A1583252, A1017251, |
| | | | | | AA515138, AW265688, AA526099, A1291037, A1859438, A1669421, |
| | | | | | AA297666, A1148277, AW270385, AW271917, A1053784, AA737309, |
| | | | | | AL079734, A1755202, AA513551, A1066646, AA515723, A1445224, |
| | | | | | AA397389, A1446259, A1884383, AW020088, AW237905, AW162489, |
| | | | | | AA825827, A1889579, AW274191, A1206841, AW238253, A1362415, |
| | | | | | AA832016, AA654874, AA829036, A1753365, A1792521, A1583106, |
| | | | | | AA515907, A1096738, A1683131, A1049709, AA225890, A1491765, |
| | | | | | AA084609, AA714331, H53284, AW270619, A1587349, A1249365, |
| | | | | | AW338035, A1887235, AW338021, AW302711, H90844, AL120665, |
| | | | | | AA828619, AW402784, A1144081, AA525331, A1445934, AA829065, |
| | | | | | AA599080, AA828047, AC008372, AC005520, AL096701, AC004797, |
| | | | | | AC002470, AP000252, AC006449, U80017, U91326, AL008719, AP000512, |
| | | | | | AF111168, AC004383, AC005914, Z92546, AC002544, AC006241, AC003119, |
| | | | | | AC005632, AP000353, AL121658, AL049839, AC004895, AL049757, Z83840, |
| | | | | | AC005500, AL132712, AC006960, AC006071, AL133448, AL049776, |
| | | | | | AL022238, AC006538, AF017104, AC003006, AL031595, AC006111, |
| | | | | | AP000045, AL121653, AL035422, AP000692, AC005529, AL022313, |
| | | | | | AL034420, AC006023, AP000113, AL031670, D84394, AC002394, AC006077, |
| | | | | | AL031311, AC006965, AC005971, Z94801, AP000555, AC005391, AC005399, |
| | | | | | AC007731, AC005484, AE000658, Z84469, Z95114, AC007664, AC005086, |
| | | | | | AL031255, AL035086, AL034548, Z99716, AC009247, AL021977, Z98051, |
| | | | | | AC008134, AC003982, AC005231, AL022336, AC004125, AC002352, |
| | | | | | AL035683, AC003035, AC005081, AL121754, AF118808, AL021154, |
| | | | | | AL049569, AC005005, Z97054, AC004983, AL021808, AC005057, AC004531, |
| | | | | | AC005722, AC005049, AC005412, L78833, AC002472, AL050348, AC004167, |
| | | | | | AC007792, AL031680, AC005089, U82828, AL031848, AC003109, |
| | | | | | AC003043, AC005537, AC007041, AL031228, AL109801, AC006468, |
| | | | | | AL035089, Z97056, AF064861, AL022721, AP000116, AC006966, AC004382, |
| | | | | | AP000036, AC006001, AC005619, AJ246003, AC005088, AC004884, |
| | | | | | AF109907, AC006211, AL136295, AC004534, AL035249, Z93023, AC004890, |
| | | | | | AP000694, AC002558, AC007263, AC005082, AL035587, AP000152, |
| | | | | | AP000501, AC004076, AP000066, AC005800, AL109963, AC016831, |
| | | | | | AC007225, AC009516, U78027, AC005102, AC002314, AC004675, |
| | | | | | AF196779, AC005203, AP000065, AL031678, AC004050, AC005940, |
| | | | | | AF031078, AC007226, AC005531, AC002316, AC020663, AC004686, |
| | | | | | AC004821, AC005796, AC007688, AF088219, AC005670, AC004771, |
| | | | | | AC005696, AC005944, AL033533, AC002312, Z95331, AF030876, AL049869, |
| | | | | | Z83822, AC007066, AC000353, AL035071, AL080243, AC002301, AC004985, |
| | | | | | AL022311, AF001550, AC005324, AC004967, AL121603, AC010205, |
| | | | | | AC006017, AL133246, AL078581, AL022302, AC004263, AL031588, |
| | | | | | AC005527, AC003101, Z86090, AC007216, AL021707, AP000117, AC006441, |
| | | | | | AL139054, AC004472, AF207550, AL031258, Z94160, AL049829, AC005821, |
| | | | | | AC005228, AF134726, AL021391, AC007537, AC004520, AC007036, |
| | | | | | AC002306, AC005996, AC004491, AC005237, AC007283, AC003108, |
| | | | | | AP000350, AC012627, AP000553, AC006958, AC002044, AC002126, |
| | | | | | AC005225, AC005911, AF031076, AC005694, AF047825, AL031683, |
| | | | | | AC005514, AP000356, AD000092, AC005274, AC007129, AL110502, |
| | | | | | AP000030, AC007536, AF196969, AF053356, AL049779, AL032821, |
| | | | | | AC004858, AC005180, AC005846, AL022327, AL022476, AC005229, |
| | | | | | AC004882, AC005695, and AC007055. |
| HIDAA03 | 52 | 922105 | 1-462 | 15-476 | AA807734. |
| HAPUA06 | 53 | 934457 | 1-415 | 15-429 | R60827, A1910137, AL042155, AW163494, AW163026, A1879279, and |
| | | | | | AB011116. |
| HAPTU85 | 54 | 813245 | 1-714 | 15-728 | AA152099, AA152025, A1735484, A1927603, and AB032417. |
| HAPTN70 | 55 | 756764 | 1-484 | 15-498 | R54235, R35018, A1904777, A1205537, and A1672044. |
| HAPTK51 | 56 | 719671 | 1-423 | 15-437 | W46956, and AL022395. |
| HAPTF84 | 57 | 782436 | 1-508 | 15-522 | H38047, AA397968, W69645, H38046, A1928890, A1362694, T71257, H69661, |
| | | | | | A1749213, A1274621, AW338268, AA761036, AA688266, A1749212, |
| | | | | | AA827113, T07974, AA365893, AA642289, T99274, R48980, AW152347, |
| | | | | | AA825827, AA525807, A1207476, AA136543, A1298079, N42313, AL022721, |
| | | | | | AC004595, AC000134, AC005081, AC007371, AL049697, AC004858, |
| | | | | | AF109907, AC006515, AC005696, AC005015, AP000694, AL096701, |
| | | | | | AL023553, X64467, AC004458, AL117694, AC005585, AC007731, AF081786, |
| | | | | | AC005500, AL031845, AC000077, AL031680, U62293, AC006509, |
| | | | | | AC002477, AP000300, Z97056, AP000689, AB003151, AP000688, AC005057, |
| | | | | | AL079342, AC005899, AL132800, AC003954, AC006088, AC008040, |
| | | | | | AC005921, AC005225, AC005926, AC006039, AP000113, AP000045, Z68284, |
| | | | | | AL031602, AC002350, AL031670, Z95114, AP000466, AL031295, AL035682, |
| | | | | | AL096775, AC005632, AC004900, Y17457, AL133448, AF064859, AC000353, |
| | | | | | Y10196, AL080317, Z95116, AC004796, AC000120, U91321, AC005952, |
| | | | | | AL096801, AC005366, AC004876, AC007055, AC007151, AC008085, |
| | | | | | A1219467, A1370903, A1817998, AW006675, A1188969, A1688413, A1924291, |
| | | | | | AW192357, A1342067, AA652203, AA836931, A1151272, AA866079, |
| | | | | | AW340450, AA994428, AA610260, AA281814, N95549, AA535006, |
| | | | | | AA659717, A1470216, AA028142, A1140488, AA781873, N77593, A1146914, |
| | | | | | AA593577, AA302255, AA909785, AA994708, R40962, R16772, A1240959, |
| | | | | | T99330, R94758, A1805234, AA044303, W72367, AA479567, AA743856, |
| | | | | | AA454515, AA662201, AA631529, A1809090, and AA584301. |
| HAPSN95 | 60 | 733638 | 1-834 | 15-848 | AA053797, AA021218, H38615, A1912830, A1972475, A1380636, W37660, |
| | | | | | AA485506, A1371124, AA197167, AA259013, AA282278, AA828320, |
| | | | | | AW277099, AW371035, N34177, A1679643, A1307217, AW394139, |
| | | | | | AW394137, AW394158, AW394138, AA282325, AA482640, AA017595, |
| | | | | | AA600985, AA634812, AA664134, AA171725, AW403554, AW291795, |
| | | | | | AA236738, W37567, A1032076, AA465438, AA287539, AA620850, |
| | | | | | AA522921, AA456500, N25579, AW450054, AW380636, AA461402, |
| | | | | | AA513834, AA171915, A1566656, AA460474, W42596, AW328535, |
| | | | | | AA490398, AA430415, T25750, and AF100421. |
| HAPSL79 | 61 | 774352 | 1-680 | 15-694 | AA083756. |
| HAPSL78 | 62 | 864795 | 1-729 | 15-743 | AA234400, and AF117825. |
| HAPSK65 | 63 | 747743 | 1-523 | 15-537 | R13594, T07447, Z46011, and F07746. |
| HAPS185 | 64 | 784168 | 1-446 | 15-460 | A1798901, AW148631, A1700179, AA813813, A1016235, AA926704, and |
| | | | | | A1870243. |
| HAPS144 | 65 | 716366 | 1-471 | 15-485 | AA843329, A1700375, H42488, A1262829, AA807934, AA075048, AA075047, |
| | | | | | AA553974, AW008089, A1952885, AA225645, AW080062, AA568498, |
| | | | | | A1625971, A1818921, AA613789, AW085751, AW440545, A1003543, T70718, |
| | | | | | A1732327, AA584125, Z93017, AL133163, AL049694, AC006312, AC005399, |
| | | | | | AL031281, AC004851, AC005696, AL050348, AL121655, AF207550, |
| | | | | | AC005899, AC007421, AL035454, AC004813, AL022313, AL133448, |
| | | | | | AL133353, AC007676, AC007371, AC000039, AC005839, AC005037, |
| | | | | | AL024498, AC004821, Z99716, AC004796, AC009247, AC007050, AC007664, |
| | | | | | AL122021, AC005512, AL021939, AC005944, AC010205, Z85986, Z84487, |
| | | | | | L78810, AC005057, AL078581, AC006241, AF111168, AP000114, AP000046, |
| | | | | | AC002996, AC002476, AC006211, Z98051, AL136363, Z93023, AC005377, |
| | | | | | AL049838, Z99755, AC005694, AL133245, AL121603, AL096763, AP000302, |
| | | | | | AL022237, AL122020, AL031287, AC005324, AC000353, AP000359, |
| | | | | | AC002115, AC005179, AC005911, AL035086, AC007314, AC004797, |
| | | | | | Y12855, AC006S11, AL121754, AC007688, AL049869, AF030453, AC005821, |
| | | | | | AL031588, AL008718, Z98950, AC00311O, AF134726, AC004622, Z95115, |
| | | | | | Z98304, AD000833, AC004966, AC002310, AP000134, AP000212, AC006057, |
| | | | | | AC006505, AC004587, Z83845, Y18000, AC002425, AC005300, AC006285, |
| | | | | | AP000692, AL022302, AC006441, AC002347, AC004526, AL050332, |
| | | | | | AC002543, AL022238, AP000558, AL031120, AC006017, AC008018, |
| | | | | | AL121658, AC006121, AL080243, AL035443, AL049540, AC005800, |
| | | | | | AC007242, AP000555, AL031678, Z68285, AP000688, AL031848, AC005755, |
| | | | | | AL034451, AL049776, AC004662, AL023575, AL096791, AC005231, |
| | | | | | AC006449, AC002059, AC006277, AL049709, AP000553, U91323, AL022163, |
| | | | | | Z83840, U95742, AC005088, AC002045, AL031255, AC005520, AC005071, |
| | | | | | AL109952, Z93930, U85195, AC005180, AC005011, AC005280, AL031589, |
| | | | | | AE000658, AC004953, AL033527, AC006088, AF205588, AC005531, |
| | | | | | AC002551, AC004230, AL020995, AC008044, Z81364, AL049780, AC005740, |
| | | | | | AC005921, AC003982, AC007238, AC007731, AL136504, AC004878, |
| | | | | | AC005684, AC002314, AC005089, AC006160, Z93241, AC007216, AL031575, |
| | | | | | AL034549, AC002316, AL139054, AL096701, AC004386, AC005484, |
| | | | | | AC005247, AC004033, AC006146, AL049759, AC005529, AC006261, |
| | | | | | AC007030, Z86090, and AC003043. |
| HAPSC58 | 66 | 735503 | 1-569 | 15-583 | N62696. |
| HAPSC06 | 67 | 933285 | 1-230 | 15-244 | H81938. |
| HAPSA17 | 68 | 662678 | 1-327 | 15-341 | AA047085. |
| HAPRM40 | 69 | 587668 | 1-440 | 15-454 | H67589, and AB033028. |
| HAPRJ45 | 70 | 758111 | 1-577 | 15-591 | 1108977, AA323320, and AL137556. |
| HAPRG26 | 71 | 680612 | 1-423 | 15-437 | |
| HAPRB02 | 72 | 919555 | 1-602 | 15-616 | A1435272, A1760119, A1824092, AW207001, R24416, R24415, AF110524, |
| | | | | | AF110523, and AF110522. |
| HAPQU75 | 73 | 570798 | 1-1379 | 15-1393 | F23327, AW293716, A1821608, A1283913, AA502990, AA665645, N71074, |
| | | | | | AA432081, H48436, A1653636, AA555001, AW105176, AA605266, A1791850, |
| | | | | | AA827771, A1597820, AA548710, AW439558, AA320105, A1889794, |
| | | | | | AA484751, L47234, M19822, AC006026, AP000694, AP000557, AC005755, |
| | | | | | AC005231, AC007676, 1195740, AF196779, AC006285, AC005180, |
| | | | | | AC00SO8I, AC007263, AP000558, AC002984, AF001552, AC005046, |
| | | | | | AL121694, AC004815, AC005932, AC005696, Z98044, AC005778, AC003101, |
| | | | | | AC007690, AL117258, AC005015, U95742, AL022476, AP000692, AL022238, |
| | | | | | AB009813, AP000143, AC005920, AC020663, AC009516, AB023049, |
| | | | | | AP000513, Z98752, AC004526, AC007845, AC004150, AC003043, AL031594, |
| | | | | | AC006536, AC004028, AC006017, Z84480, AP000211, AP000133, AC016025, |
| | | | | | AL109623, AC007216, AC006449, AC004638, AL031283, AC007225, |
| | | | | | AL022163, AF196972, AC006581, AL008718, AC003007, AC005520, U80017, |
| | | | | | AL031848, AL049736, AC005305, AL031672, and AL031257. |
| HAPQQ45 | 74 | 587591 | 1-617 | 15-631 | W72833, N41347, A1362075, W72834, N41354, and AA746225. |
| HAPQJ23 | 75 | 587566 | 1-596 | 15-610 | H97939, A1207521, A1809186, AW390991, AW452917, AW004975, |
| | | | | | AF104304, AF130420, and AF130419. |
| HAPPX24 | 76 | 739820 | 1-856 | 15-870 | W19643, R22771, Z44480, T94429, F05208, and T94515. |
| HAPPW61 | 77 | 801982 | 1-273 | 15-287 | A1076372, N67677, A1610758, AA531260, N91560, A1419149, AA703122, |
| | | | | | A1582696, A1570408, W68296, AA427778, AA953809, W03523, A1244118, |
| | | | | | AW263111, A1049840, AA847685, A1446293, R55527, W68477, AA052999, |
| | | | | | AA149238, AA343907, and AA345484. |
| HAPOW05 | 78 | 945202 | 1-535 | 15-549 | AW445204, R01230, AA827188, AA504834, and T93623. |
| HAPOT58 | 79 | 951615 | 1-804 | 15-818 | AW368199, AA136357, A1879179, A1373515, A1762032, AW363229, |
| | | | | | AA371258, AA370986, AA113788, A1935355, AL037788, AA360514, |
| | | | | | A1907228, AA605260, A1984946, AA355628, A1431922, AA291183, |
| | | | | | AA745877, N74643, A1392798, A1693730, AA070852, A1942228, AW371352, |
| | | | | | AW025654, AW363223, A1656682, A1340563, H83189, AA470851, N79184, |
| | | | | | and AF161432. |
| HAPOT24 | 80 | 587516 | 1-582 | 15-596 | N29053. |
| HAPOT10 | 81 | 964373 | 1-484 | 15-498 | A1636321, and AA463893. |
| HAPOS73 | 82 | 587512 | 1-509 | 15-523 | N36440, AL033538, and AL008724. |
| HAPON47 | 83 | 934577 | 1-639 | 15-653 | N39586, A1289392, A1522240, AW293111, A1801940, A1674530, AA339213, |
| | | | | | T92848, W47299, and AF161384. |
| HAPOK94 | 84 | 964606 | 1-409 | 15-423 | AA234473, A1041947, W25216, A1640536, AW104454, AA526962, H64645, |
| | | | | | AA845046, N45383, A1078720, AA157974, and AC007099. |
| HAPO108 | 85 | 959128 | 1-588 | 15-602 | H11294, H18118, H41809, H46021, H41853, H23924, H23925, H18163, and |
| | | | | | H46093. |
| HAPOE54 | 86 | 859914 | 1-808 | 15-822 | H95248, A1291142, A1499561, A1652302, AW339787, AW182841, A1341444, |
| | | | | | A1239954, AW195600, A1355132, A1291739, H95295, AA628254, AA489381, |
| | | | | | AA758667, AA486441, AA180332, AA485907, AA486035, AA187867, |
| | | | | | AA113389, AA179305, AA181636, AA705863, AA098807, AA331530, |
| | | | | | A1247845, A1829110, W80571, AW389415, and AF077188. |
| HAPNY68 | 87 | 752906 | 1-341 | 15-355 | AA121820, AA033818, A1092952, A1143765, AW014192, AL432388, and |
| | | | | | AB020649. |
| HAPNS86 | 88 | 587322 | 1-421 | 15-435 | N62340, AA973128, and A1685281. |
| HAPNR50 | 89 | 799776 | 1-360 | 15-374 | T75172, and F12811. |
| HAPNN11 | 90 | 966797 | 1-428 | 15-442 | AA878307, A1732918, AA224878, AA693688, A1050093, A1254913, |
| | | | | | AWO8I165, AW084745, AW084739, AL120703, AW265393, T85628, |
| | | | | | AA677623, AA706628, N53695, N39178, AA468022, A1754170, AA834707, |
| | | | | | AA838190, AL044234, A1361900, AA715805, AW238121, AL135743, T99827, |
| | | | | | A1817976, AW021597, AA572999, R12974, AL038936, AI470431, AL049814, |
| | | | | | AP000045, AP000113, U78308, AC005220, AL020997, AB001523, AC009498, |
| | | | | | AL031427, AF001549, AC007707, Z97876, AC003012, AL035251, AC006064, |
| | | | | | AL022320, AL132712, AC004526, AC004458, AC004815, AC002527, |
| | | | | | AC004967, AC004126, AC007993, AP000042, APOGO110, AL022721, |
| | | | | | AC005209, AC004875, AC006023, U91323, AL133382, AC004067, |
| | | | | | AC005291, AL034554, AL035423, AC004881, AL109847, AC002299, |
| | | | | | AC007327, Z97832, AC000003, AC009721, AL022238, AC005367, AC003089, |
| | | | | | AC005411, AC005069, AC005844, AL023804, AC006332, AL049759, |
| | | | | | AC003119, Z93023, AL021026, AC005682, AP000359, AC004685, AL034423, |
| | | | | | AC007207, AC005666, AC002289, AC008033, AC000378, AC004707, |
| | | | | | AL022328, AC005479, AP000688, AL031277, AF053356, AL133445, |
| | | | | | AC005624, AC006084, AC006001, AF196779, AL035089, AC004167, |
| | | | | | AC002287, AL031055, AC002352, AC002297, AC003104, AC006262, |
| | | | | | AC005736, AC007298, AC003664, AL031053, AP000252, AL050306, |
| | | | | | AC002126, AP000031, AC007051, AB026898, AC004806, AC016026, |
| | | | | | U91321, AF111168, AL022718, AC004032, AF064864, AF107258, and |
| | | | | | AC003685. |
| HAPNM66 | 91 | 616165 | 1-479 | 15-493 | T87441, R80760, R25478, AW369661, A1478756, and A1915980. |
| HAPNK27 | 92 | 848723 | 1-548 | 15-562 | N31253, AW383357, AA664604, AA484228, AA845659, A1061313, |
| | | | | | AA640685, AA862243, AA613138, AA598545, AA225226, AA604843, |
| | | | | | AA580251, A1564496, AA720774, A1291037, AW270768, AA879053, |
| | | | | | A1244254, A1590458, AW075132, AA640617, AA508809, AW439480, |
| | | | | | AC009516, AL022476, AC005914, AL049692, AC002369, AC005661, |
| | | | | | AC005225, AL096701, U91326, AF053356, AC006241, AL050318, AC002464, |
| | | | | | AC003663, AC002425, AL109628, AF111169, AL133245, AL117258, |
| | | | | | AC005899, AF109907, AP000690, AL031311, AP000558, AB023049, U80017, |
| | | | | | Z46936, AL049712, AC006211, Z69917, AP000557, AL009181, U07563, |
| | | | | | AC007536, AL080317, AC006047, AC007564, AC007676, AL109984, |
| | | | | | AC006511, AC007637, AC004019, AL049795, AC006965, AC006449, |
| | | | | | AC004149, AL031670, AF205588, AC005089, AL133448, Z82244, AL022320, |
| | | | | | AP000115, AL096791, AC003665, AC003071, AC005527, AC006538, |
| | | | | | AC004887, AL021391, AC006468, AC004797, AP000509, AC004477, |
| | | | | | AC007688, AC002350, AC007546, AC007687, U91318, AL049779, |
| | | | | | AC005839, AC002365, AC005808, AC005484, AC005736, AC008273, |
| | | | | | AC005399, AC006130, AL109623, AC004858, AC007388, AL020997, |
| | | | | | AP000512, AC005520, AL121652, AL080243, AC004972, AC005886, |
| | | | | | AL023574, Z83840, AP001053, AF047825, AC007371, AC004686, AL035086, |
| | | | | | AC004526, AL133371, AP000505, AC005901, AC002544, AL035458, |
| | | | | | AC003070, AC005796, AC004033, Z97054, AC007263, AC004263, AL031005, |
| | | | | | AC005969, AC005529, AC003101, Z99943, AC005874, AF134471, AF111168, |
| | | | | | AC004024, AC004895, AF129756, AL031296, AL050308, AL132987, |
| | | | | | AC004771, AC007686, AC000052, AC006013, AL121603, AC005011, |
| | | | | | AD001527, AC005071, AC005288, AC003664, AC006530, AF134726, |
| | | | | | AC007225, AC004491, AC006480, AC005231, Z98750, AF045555, AL109758, |
| | | | | | AL109952, AC004655, AC007993, AC005632, AC006285, AP000030, |
| | | | | | AC006312, AL022313, AL133445, AC005971, AC006261, Z95114, AJ003147, |
| | | | | | AC002492, U63721, AC007421, AL049759, AC002504, AL049780, |
| | | | | | AC007298, AC006441, AC008115, AC005182, AC000379, D87675, |
| | | | | | AL031120, AF207550, AL135783, AC002059, AC007387, AL031121, |
| | | | | | AC006079, AC005067, AC007066, AC004884, AC005696, AC005837, |
| | | | | | AC005255, AL049829, AC005291, AC006432, AC002316, AC004851, |
| | | | | | AL008715, Z93244, AC005209, Z85987, AC003029, AP000170, AP000055, |
| | | | | | Y14768, AL049839, AP000212, AP000134, AL109613, AC007226, AL031295, |
| | | | | | AL078477, AC004913, AC003010, U91323, AC004832, AC003108, W88599, |
| | | | | | W93255, and AA204958. |
| HAPNI71 | 93 | 587276 | 1-715 | 15-729 | H41937, AA425252, Z42838, R67850, AA256817, R14936, and AL133113. |
| HAPNI63 | 94 | 744960 | 1-626 | 15-640 | R54909, and AL031668. |
| HAPMF94 | 95 | 796830 | 1-480 | 15-494 | A1806661, R71238, H77818, and R71290. |
| HAPBU05 | 96 | 932762 | 1-454 | 15-468 | Z24855. |
| HAPBR65 | 97 | 753903 | 1-655 | 15-669 | AA088561, A1733737, A1733763, and AA100787. |
| HAPBP83 | 98 | 714984 | 1-591 | 15-605 | N62062, AA251423, AA148461, AA568350, AW401435, AA261997, |
| HAPBP08 | 99 | 960299 | 1-524 | 15-538 | N36675, W03077, and N46373. |
| HAPBH82 | 100 | 780233 | 1-301 | 15-315 | T79532, AA987527, AA830970, A1867737, A1148507, AA811651, and |
| HAPAJ81 | 101 | 778553 | 1-554 | 15-568 | H27794, AA316205, N35774, N36350, A1478914, and A1419908. |

[0097] TABLE 4

| | | | | Cell | | |
|---|---|---|---|---|---|---|
| Code | Description | Tissue | Organ | Line | Disease | Vector |
| AR022 | a_Heart | a_Heart | | | | |
| AR023 | a_Liver | a_Liver | | | | |
| AR024 | a_mammary gland | a_mammary gland | | | | |
| AR025 | a_Prostate | a_Prostate | | | | |
| AR026 | a_small intestine | a_small intestine | | | | |
| AR027 | a_Stomach | a_Stomach | | | | |
| AR028 | Blood B cells | Blood B cells | | | | |
| AR029 | Blood B cells activated | Blood B cells | | | | |
| | | activated | | | | |
| AR030 | Blood B cells resting | Blood B cells resting | | | | |
| AR031 | Blood T cells activated | Blood T cells | | | | |
| | | activated | | | | |
| AR032 | Blood T cells resting | Blood T cells resting | | | | |
| AR033 | brain | brain | | | | |
| AR034 | breast | breast | | | | |
| AR035 | breast cancer | breast cancer | | | | |
| AR036 | Cell Line CAOV3 | Cell Line CAOV3 | | | | |
| AR037 | cell line PA-1 | cell line PA-1 | | | | |
| AR038 | cell line transformed | cell line transformed | | | | |
| AR039 | colon | colon | | | | |
| AR040 | colon (9808co65R) | colon (9808co65R) | | | | |
| AR041 | colon (9809co15) | colon (9809co15) | | | | |
| AR042 | colon cancer | colon cancer | | | | |
| AR043 | colon cancer | colon cancer | | | | |
| | (9808co64R) | (9808co64R) | | | | |
| AR044 | colon cancer 9809co14 | colon cancer | | | | |
| | | 9809co14 | | | | |
| AR045 | corn clone 5 | corn clone 5 | | | | |
| AR046 | corn clone 6 | corn clone 6 | | | | |
| AR047 | corn clone 2 | corn clone 2 | | | | |
| AR048 | corn clone 3 | corn clone 3 | | | | |
| AR049 | Corn Clone 4 | Corn Clone 4 | | | | |
| AR050 | Donor II B Cells 24 hrs | Donor II B Cells | | | | |
| | | 24 hrs | | | | |
| AR051 | Donor II B Cells 72 hrs | Donor II B Cells | | | | |
| | | 72 hrs | | | | |
| AR052 | Donor II B-Cells 24 | Donor II B-Cells 24 | | | | |
| | hrs. | hrs. | | | | |
| AR053 | Donor II B-Cells 72 hrs | Donor II B-Cells | | | | |
| | | 72hrs | | | | |
| AR054 | Donor II Resting B | Donor II Resting B | | | | |
| | Cells | Cells | | | | |
| AR055 | Heart | Heart | | | | |
| AR056 | Human Lung | Human Lung | | | | |
| | (clonetech) | (clonetech) | | | | |
| AR057 | Human Mammary | Human Mammary | | | | |
| | (clontech) | (clontech) | | | | |
| AR058 | Human Thymus | Human Thymus | | | | |
| | (clonetech) | (clonetech) | | | | |
| AR059 | Jurkat (unstimulated) | Jurkat (unstimulated) | | | | |
| AR060 | Kidney | Kidney | | | | |
| AR061 | Liver | Liver | | | | |
| AR062 | Liver (Clontech) | Liver (Clontech) | | | | |
| AR063 | Lymphocytes chronic | Lymphocytes chronic | | | | |
| | lymphocytic leukaemia | lymphocytic | | | | |
| | | leukaemia | | | | |
| AR064 | Lymphocytes diffuse | Lymphocytes diffuse | | | | |
| | large B cell lymphoma | large B cell | | | | |
| | | lymphoma | | | | |
| AR065 | Lymphocytes follicular | Lymphocytes | | | | |
| | lymphoma | foilicular lymphoma | | | | |
| AR066 | normal breast | normal breast | | | | |
| AR067 | Normal Ovarian | Normal Ovarian | | | | |
| | (4004901) | (4004901) | | | | |
| AR068 | Normal Ovary | Normal Ovary | | | | |
| | 9508G045 | 9508G045 | | | | |
| AR069 | Normal Ovary | Normal Ovary | | | | |
| | 9701G208 | 9701G208 | | | | |
| AR070 | Normal Ovary | Normal Ovary | | | | |
| | 98060005 | 9806G005 | | | | |
| AR071 | Ovarian Cancer | Ovarian Cancer | | | | |
| AR072 | Ovarian Cancer | Ovarian Cancer | | | | |
| | (9702G001) | (9702G001) | | | | |
| AR073 | Ovarian Cancer | Ovarian Cancer | | | | |
| | (9707G029) | (9707G029) | | | | |
| AR074 | Ovarian Cancer | Ovarian Cancer | | | | |
| | (9804G011) | (98040011) | | | | |
| AR075 | Ovarian Cancer | Ovarian Cancer | | | | |
| | (9806G019) | (9806G019) | | | | |
| AR076 | Ovarian Cancer | Ovarian Cancer | | | | |
| | (9807G017) | (9807G017) | | | | |
| AR077 | Ovarian Cancer | Ovarian Cancer | | | | |
| | (98090001) | (9809G00 1) | | | | |
| AR078 | ovarian cancer 15799 | ovarian cancer 15799 | | | | |
| AR079 | Ovarian Cancer | Ovarian Cancer | | | | |
| | 17717A1D | 17717A1D | | | | |
| AR080 | Ovarian Cancer | Ovarian Cancer | | | | |
| | 4004664B1 | 4004664B1 | | | | |
| AR081 | Ovarian Cancer | Ovarian Cancer | | | | |
| | 4005315A1 | 4005315A1 | | | | |
| AR082 | ovarian cancer | ovarian cancer | | | | |
| | 94127303 | 94127303 | | | | |
| AR083 | Ovarian Cancer | Ovarian Cancer | | | | |
| | 96069304 | 96069304 | | | | |
| AR084 | Ovarian Cancer | Ovarian Cancer | | | | |
| | 97070029 | 97070029 | | | | |
| AR085 | Ovarian Cancer | Ovarian Cancer | | | | |
| | 98070045 | 9807G045 | | | | |
| AR086 | ovarian cancer | ovarian cancer | | | | |
| | 98090001 | 9809G001 | | | | |
| AR087 | Ovarian Cancer | Ovarian Cancer | | | | |
| | 9905C032RC | 9905C032RC | | | | |
| AR088 | Ovarian cancer 9907 | Ovarian cancer 9907 | | | | |
| | C00 3rd | C00 3rd | | | | |
| AR089 | Prostate | Prostate | | | | |
| AR090 | Prostate (clonetech) | Prostate (clonetech) | | | | |
| AR091 | prostate cancer | prostate cancer | | | | |
| AR092 | prostate cancer #15176 | prostate cancer | | | | |
| | | #15176 | | | | |
| AR093 | prostate cancer #15509 | prostate cancer | | | | |
| | | #15509 | | | | |
| AR094 | prostate cancer #15673 | prostate cancer | | | | |
| | | #15673 | | | | |
| AR095 | Small Intestine | Small Intestine | | | | |
| | (Clontech) | (Clontech) | | | | |
| AR096 | Spleen | Spleen | | | | |
| AR097 | Thymus T cells | Thymus T cells | | | | |
| | activated | activated | | | | |
| AR098 | Thymus T cells resting | Thymus T cells | | | | |
| | | resting | | | | |
| AR099 | Tonsil | Tonsil | | | | |
| AR100 | Tonsil geminal center | Tonsil geminal center | | | | |
| | centroblast | centroblast | | | | |
| AR101 | Tonsil germinal center | Tonsil germinal | | | | |
| | B cell | center B cell | | | | |
| AR102 | Tonsil lymph node | Tonsil lymph node | | | | |
| AR103 | Tonsil memory B cell | Tonsil memory B cell | | | | |
| AR104 | Whole Brain | Whole Brain | | | | |
| AR105 | Xenograft ES-2 | Xenograft ES-2 | | | | |
| AR106 | Xenograft SW626 | Xenograft SW626 | | | | |
| H0042 | Human Adult | Human Adult | Lung | | | Uni-ZAP XR |
| | Pulmonary | Pulmonary | | | | |
| H0375 | Human Lung | Human Lung | | | | pCMVSport I |
| H0575 | Human Adult | Human Adult | Lung | | | Uni-ZAP XR |
| | Pulmonary; re-excision | Pulmonary | | | | |
| H0649 | Lung, Normal: | Normal Lung | | | | pSport1 |
| | (4005313 B1) | | | | | |
| H0652 | Lung, Normal: | Normal Lung | | | | pSport1 |
| | (4005313 B1) | | | | | |
| L0362 | Stratagene ovarian | | | | | Bluescript |
| | cancer (#937219) | | | | | SK- |
| L0387 | NCI_CGAP_GCB0 | germinal center B- | tonsil | | | Bluescript |
| | | cells | | | | SK- |
| L0438 | normalized infant brain | total brain | brain | | | lafmid BA |
| | cDNA | | | | | |
| L0439 | Soares infant brain | | whole brain | | | Lafmid BA |
| | 1NIB | | | | | |
| L0485 | STRATAGENE | skeletal muscle | leg muscle | | | Lambda |
| | Human skeletal muscle | | | | | ZAPII |
| | cDNA library, cat. | | | | | |
| | #936215. | | | | | |
| L0517 | NCI_CGAP_Pr1 | | | | | pAMP10 |
| L0523 | NCI_CGAP_Lip2 | liposarcoma | | | | pAMP10 |
| L0589 | Stratagene fetal retina | | | | | pBluescript |
| | 937202 | | | | | SK- |
| L0590 | Stratagene fibroblast | | | | | pBluescript |
| | (#937212) | | | | | SK- |
| L0593 | Stratagene | | | | | pBluescript |
| | neuroepithelium | | | | | SK- |
| | (#937231) | | | | | |
| L0595 | Stratagene NT2 | neuroepithelial cells | brain | | | pBluescript |
| | neuronal precursor | | | | | SK- |
| | 937230 | | | | | |
| L0596 | Stratagene colon | | colon | | | pBluescript |
| | (#937204) | | | | | SK- |
| L0598 | Morton Fetal Cochlea | cochlea | ear | | | pBluescript |
| | | | | | | 5K- |
| L0599 | Stratagene lung | | lung | | | pBluescript |
| | (#937210) | | | | | SK- |
| L0600 | Weizmann Olfactory | olfactory epithelium | nose | | | pBluescript |
| | Epithelium | | | | | SK- |
| L0659 | NCI_CGAP_PanI | adenocarcinoma | pancreas | | | pCMV- |
| | | | | | | SPORT6 |
| L0731 | Soares_pregnant_uteru | | uterus | | | pT7T3-Pac |
| | s_NbHPU | | | | | |
| L0740 | Soares melanocyte | melanocyte | | | | pT7T3D |
| | 2NbHM | | | | | (Pharmacia) |
| | | | | | | with a |
| | | | | | | modified |
| | | | | | | polylinker |
| L0742 | Soares adult brain | | brain | | | pT7T3D |
| | N2b5HB55Y | | | | | (Pharmacia) |
| | | | | | | with a |
| | | | | | | modified |
| | | | | | | polylinker |
| L0743 | Soares breast 2NbHBst | | breast | | | pT7T3D |
| | | | | | | (Pharmacia) |
| | | | | | | with a |
| | | | | | | modified |
| | | | | | | polylinker |
| L0744 | Soares breast 3NbHBst | | breast | | | pT7T3D |
| | | | | | | (Pharmacia) |
| | | | | | | with a |
| | | | | | | modified |
| | | | | | | polylinker |
| L0745 | Soares retina N2b4HR | retina | eye | | | pT7T3D |
| | | | | | | (Pharmacia) |
| | | | | | | with a |
| | | | | | | modified |
| | | | | | | polylinker |
| L0747 | Soares_fetal_heart_Nb | | heart | | | pT7T3D |
| | HH19W | | | | | (Pharmacia) |
| | | | | | | with a |
| | | | | | | modified |
| | | | | | | polylinker |
| L0748 | Soares fetal liver spleen | | Liver and | | | pT7T3D |
| | 1NFLS | | Spleen | | | (Pharmacia) |
| | | | | | | with a |
| | | | | | | modified |
| | | | | | | polylinker |
| L0749 | Soares_fetal_liver_sple | | Liver and | | | pT7T3D |
| | en_1NFLS_SI | | Spleen | | | (Pharmacia) |
| | | | | | | with a |
| | | | | | | modified |
| | | | | | | polylinker |
| L0752 | Soares_parathyroid_tu | parathyroid tumor | parathyroid | | | pT7T3D |
| | mor_NbHPA | | gland | | | (Pharmacia) |
| | | | | | | with a |
| | | | | | | modified |
| | | | | | | polylinker |
| L0754 | Soares placenta Nb2HP | | placenta | | | pT7T3D |
| | | | | | | (Pharmacia) |
| | | | | | | with a |
| | | | | | | modified |
| | | | | | | polylinker |
| L0755 | Soares_placenta_8to9w | | placenta | | | pT7T3D |
| | eeks_2NbHP8to9W | | | | | (Pharmacia) |
| | | | | | | with a |
| | | | | | | modified |
| | | | | | | polylinker |
| L0756 | Soares_multiple_sclero | multiple sclerosis | | | | pT7T3D |
| | sis_2NbHMSP | lesions | | | | (Pharmacia) |
| | | | | | | with a |
| | | | | | | modified |
| | | | | | | polylinker |
| | | | | | | V_TYPE |
| L0757 | Soares_senescent_fibro | senescent fibroblast | | | | pT7T3D |
| | blasts_NbHSF | | | | | (Pharmacia) |
| | | | | | | with a |
| | | | | | | modified |
| | | | | | | polylinker |
| | | | | | | V_TYPE |
| L0758 | Soares_testis_NHT | | | | | pT7T3D-Pac |
| | | | | | | (Pharmacia) |
| | | | | | | with a |
| | | | | | | modified |
| | | | | | | polylinker |
| L0761 | NCI_CGAP_CLL1 | B-cell, chronic | | | | pT7T3D-Pac |
| | | lymphotic leukemia | | | | (Pharmacia) |
| | | | | | | with a |
| | | | | | | modified |
| | | | | | | polylinker |
| L0764 | NCI_CGAP_Co3 | colon | | | | pT7T3D-Pac |
| | | | | | | (Pharmacia) |
| | | | | | | with a |
| | | | | | | modified |
| | | | | | | polylinker |
| L0766 | NCI_CGAP_GCB1 | germinal center B | | | | pT7T3D-Pac |
| | | cell | | | | (Pharmacia) |
| | | | | | | with a |
| | | | | | | modified |
| | | | | | | polylinker |
| L0770 | NCI_CGAP_Bm23 | glioblastoma | brain | | | pT7T3D-Pac |
| | | (pooled) | | | | (Pharmacia) |
| | | | | | | with a |
| | | | | | | modified |
| | | | | | | polylinker |
| L0771 | NCI_CGAP_Co8 | adenocarcinoma | colon | | | pT7T3D-Pac |
| | | | | | | (Pharmacia) |
| | | | | | | with a |
| | | | | | | modified |
| | | | | | | polylinker |
| L0775 | NCI_CGAP_Kid5 | 2 pooled tumors | kidney | | | pT7T3D-Pac |
| | | (clear cell type) | | | | (Pharmacia) |
| | | | | | | with a |
| | | | | | | modified |
| | | | | | | polylinker |
| L0776 | NCI_CGAP_Lu5 | carcinoid | lung | | | pT7T3D-Pac |
| | | | | | | (Pharmacia) |
| | | | | | | with a |
| | | | | | | modified |
| | | | | | | polylinker |
| L0777 | Soares_NhHMPu_S1 | Pooled human | mixed (see | | | pT7T3D-Pac |
| | | melanocyte, fetal | below) | | | (Pharmacia) |
| | | heart, and pregnant | | | | with a |
| | | | | | | modified |
| | | | | | | polylinker |
| L0783 | NCI_CGAP_Pr22 | normal prostate | prostate | | | pT7T3D-Pac |
| | | | | | | (Pharmacia) |
| | | | | | | with a |
| | | | | | | modified |
| | | | | | | polylinker |
| L0794 | NCI_CGAP_GC6 | pooled germ cell | | | | pT7T3D-Pac |
| | | tumors | | | | (Pharmacia) |
| | | | | | | with a |
| | | | | | | modified |
| | | | | | | polylinker |
| L0803 | NCI_CGAP_Kid11 | | kidney | | | pT7T3D-Pac |
| | | | | | | (Pharmacia) |
| | | | | | | with a |
| | | | | | | modified |
| | | | | | | polylinker |

[0098] TABLE 5

| OMIM | |
|---|---|
| Reference | Description |
| 102200 | Somatotrophinoma |
| 106100 | Angioedema, hereditary |
| 123620 | Cataract, cerulean, type 2, 601547 |
| 131100 | Multiple endocrine neoplasia I |
| 131100 | Prolactinoma, hyperparathyroidism, carcinoid syndrome |
| 131100 | Carcinoid tumor of lung |
| 133780 | Vitreoretinopathy, exudative, familial |
| 147050 | Atopy |
| 153700 | Macular dystrophy, vitelliform type |
| 161015 | Mitochondrial complex I deficiency, 252010 |
| 164009 | Leukemia, acute promyelocytic, NUMA/RARA type |
| 168461 | Multiple myeloma, 254250 |
| 168461 | Parathyroid adenomatosis 1 |
| 168461 | Centrocytic lymphoma |
| 180721 | Retinitis pigmentosa, digenic |
| 180840 | Susceptibility to IDDM |
| 188826 | Sorsby fundus dystrophy, 136900 |
| 191181 | Cervical carcinoma |
| 193235 | Vitreoretinopathy, neovascular inflammatory |
| 209901 | Bardet-Biedl syndrome 1 |
| 232600 | McArdle disease |
| 259700 | Osteopetrosis, recessive |
| 259770 | Osteoporosis-pseudoglioma syndrome |
| 600045 | Xeroderma pigmentosum, group E, subtype 2 |
| 600319 | Diabetes mellitus, insulin-dependent, 4 |
| 600528 | CPT deficiency, hepatic, type I, 255120 |
| 600850 | Schizophrenia disorder-4 |
| 601669 | Hirschsprung disease, one form |
| 601884 | [High bone mass] |

[0099] Polynucleotide and Polypeptide Variants

[0100] The present invention is also directed to variants of the lung associated polynucleotide sequence disclosed in SEQ ID NO:X or the complementary strand thereto, nucleotide sequences encoding the polypeptide of SEQ ID NO:Y, the nucleotide sequence of SEQ ID NO:X encoding the polypeptide sequence as defined in column 6 of Table 1A, nucleotide sequences encoding the polypeptide as defined in column 6 of Table 1A, the nucleotide sequence as defined in columns 8 and 9 of Table 2, nucleotide sequences encoding the polypeptide encoded by the nucleotide sequence as defined in columns 8 and 9 of Table 2, the nucleotide sequence as defined in column 6 of Table 1B, nucleotide sequences encoding the polypeptide encoded by the nucleotide sequence as defined in column 6 of Table 1B, the cDNA sequence contained in Clone ID NO:Z, and/or nucleotide sequences encoding a polypeptide encoded by the cDNA sequence contained in Clone ID NO:Z.

[0101] The present invention also encompasses variants of the polypeptide sequence disclosed in SEQ ID NO:Y, a polypeptide sequence as defined in column 6 of Table 1A, a polypeptide sequence encoded by the polynucleotide sequence in SEQ ID NO:X, a polypeptide sequence encoded by the nucleotide sequence as defined in columns 8 and 9 of Table 2, a polypeptide sequence encoded by the nucleotide sequence as defined in column 6 of Table 1B, a polypeptide sequence encoded by the complement of the polynucleotide sequence in SEQ ID NO:X, and/or a polypeptide sequence encoded by the cDNA sequence contained in Clone ID NO:Z.

[0102] “Variant” refers to a polynucleotide or polypeptide differing from the polynucleotide or polypeptide of the present invention, but retaining essential properties thereof. Generally, variants are overall closely similar, and, in many regions, identical to the polynucleotide or polypeptide of the present invention.

[0103] Thus, one aspect of the invention provides an isolated nucleic acid molecule comprising, or alternatively consisting of, a polynucleotide having a nucleotide sequence selected from the group consisting of: (a) a nucleotide sequence described in SEQ ID NO:X or contained in the cDNA sequence of Clone ID NO:Z; (b) a nucleotide sequence in SEQ ID NO:X or the cDNA in Clone ID NO:Z which encodes a mature lung associated polypeptide; (c) a nucleotide sequence in SEQ ID NO:X or the cDNA sequence of Clone ID NO:Z, which encodes a biologically active fragment of a lung associated polypeptide; (d) a nucleotide sequence in SEQ ID NO:X or the cDNA sequence of Clone ID NO:Z, which encodes an antigenic fragment of a lung associated polypeptide; (e) a nucleotide sequence encoding a lung associated polypeptide having the complete amino acid sequence of SEQ ID NO:Y or the complete amino acid sequence encoded by the cDNA in Clone ID NO:Z; (f) a nucleotide sequence encoding a mature lung associated polypeptide of the amino acid sequence of SEQ ID NO:Y or the amino acid sequence encoded by the cDNA in Clone ID NO:Z; (g) a nucleotide sequence encoding a biologically active fragment of a lung associated polypeptide having the complete amino acid sequence of SEQ ID NO:Y or the complete amino acid sequence encoded by the cDNA in Clone ID NO:Z; (h) a nucleotide sequence encoding an antigenic fragment of a lung associated polypeptide having the complete amino acid sequence of SEQ ID NO:Y or the complete amino acid sequence encoded by the cDNA in Clone ID NO:Z; and (i) a nucleotide sequence complementary to any of the nucleotide sequences in (a), (b), (c), (d), (e), (f), (g), or (h), above.

[0104] The present invention is also directed to nucleic acid molecules which comprise, or alternatively consist of, a nucleotide sequence which is at least 80%, 85%, 90%, 95%, 96%, 97%, 98%, 99% or 100%, identical to, for example, any of the nucleotide sequences in (a), (b), (c), (d), (e), (f), (g), (h), or (i) above, the nucleotide coding sequence in SEQ ID NO:X or the complementary strand thereto, the nucleotide coding sequence of the cDNA contained in Clone ID NO:Z or the complementary strand thereto, a nucleotide sequence encoding the polypeptide of SEQ ID NO:Y, a nucleotide sequence encoding a polypeptide sequence encoded by the nucleotide sequence in SEQ ID NO:X, a polypeptide sequence encoded by the complement of the polynucleotide sequence in SEQ ID NO:X, a nucleotide sequence encoding the polypeptide encoded by the cDNA contained in Clone ID NO:Z, the nucleotide coding sequence in SEQ ID NO:X as defined in columns 8 and 9 of Table 2 or the complementary strand thereto, a nucleotide sequence encoding the polypeptide encoded by the nucleotide sequence in SEQ ID NO:X as defined in columns 8 and 9 of Table 2 or the complementary strand thereto, the nucleotide coding sequence in SEQ ID NO:B as defined in column 6 of Table 1B or the complementary strand thereto, a nucleotide sequence encoding the polypeptide encoded by the nucleotide sequence in SEQ ID NO:B as defined in column 6 of Table 1B or the complementary strand thereto, the nucleotide sequence in SEQ ID NO:X encoding the polypeptide sequence as defined in column 6 of Table 1A or the complementary strand thereto, nucleotide sequences encoding a polypeptide as defined in column 6 of Table 1A or the complementary strand thereto, and/or polynucleotide fragments of any of these nucleic acid molecules (e.g., those fragments described herein). Polynucleotides which hybridize to the complement of these nucleic acid molecules under stringent hybridization conditions or alternatively, under lower stringency conditions, are also encompassed by the invention, as are polypeptides encoded by these polynucleotides and nucleic acids.

[0105] In a preferred embodiment, the invention encompasses nucleic acid molecules which comprise, or alternatively, consist of a polynucleotide which hybridizes under stringent hybridization conditions, or alternatively, under lower stringency conditions, to a polynucleotide in (a), (b), (c), (d), (e), (f), (g), (h), or (i) above, as are polypeptides encoded by these polynucleotides. In another preferred embodiment, polynucleotides which hybridize to the complement of these nucleic acid molecules under stringent hybridization conditions or alternatively, under lower stringency conditions, are also encompassed by the invention, as are polypeptides encoded by these polynucleotides.

[0106] In another embodiment, the invention provides a purified protein comprising, or alternatively consisting of, a polypeptide having an amino acid sequence selected from the group consisting of: (a) the complete amino acid sequence of SEQ ID NO:Y or the complete amino acid sequence encoded by the cDNA in Clone ID NO:Z; (b) the amino acid sequence of a mature lung associated polypeptide having the amino acid sequence of SEQ ID NO:Y or the amino acid sequence encoded by the cDNA in Clone ID NO:Z; (c) the amino acid sequence of a biologically active fragment of a lung associated polypeptide having the complete amino acid sequence of SEQ ID NO:Y or the complete amino acid sequence encoded by the cDNA in Clone ID NO:Z; and (d) the amino acid sequence of an antigenic fragment of a lung associated polypeptide having the complete amino acid sequence of SEQ ID NO:Y or the complete amino acid sequence encoded by the cDNA in Clone ID NO:Z.

[0107] The present invention is also directed to proteins which comprise, or alternatively consist of, an amino acid sequence which is at least 80%, 85%, 90%, 95%, 96%, 97%, 98%, 99% or 100%, identical to, for example, any of the amino acid sequences in (a), (b), (c), or (d), above, the amino acid sequence shown in SEQ ID NO:Y, the amino acid sequence encoded by the cDNA contained in Clone ID NO:Z, the amino acid sequence of the polypeptide encoded by the nucleotide sequence in SEQ ID NO:X as defined in columns 8 and 9 of Table 2, the amino acid sequence of the polypeptide encoded by the nucleotide sequence in SEQ ID NO:B as defined in column 6 of Table 1B, the amino acid sequence as defined in column 6 of Table 1A, an amino acid sequence encoded by the nucleotide sequence in SEQ ID NO:X, and an amino acid sequence encoded by the complement of the polynucleotide sequence in SEQ ID NO:X. Fragments of these polypeptides are also provided (e.g., those fragments described herein). Further proteins encoded by polynucleotides which hybridize to the complement of the nucleic acid molecules encoding these amino acid sequences under stringent hybridization conditions or alternatively, under lower stringency conditions, are also encompassed by the invention, as are the polynucleotides encoding these proteins.

[0108] By a nucleic acid having a nucleotide sequence at least, for example, 95% “identical” to a reference nucleotide sequence of the present invention, it is intended that the nucleotide sequence of the nucleic acid is identical to the reference sequence except that the nucleotide sequence may include up to five point mutations per each 100 nucleotides of the reference nucleotide sequence encoding the polypeptide. In other words, to obtain a nucleic acid having a nucleotide sequence at least 95% identical to a reference nucleotide sequence, up to 5% of the nucleotides in the reference sequence may be deleted or substituted with another nucleotide, or a number of nucleotides up to 5% of the total nucleotides in the reference sequence may be inserted into the reference sequence. The query sequence may be an entire sequence referred to in Table 1A or 2 as the ORF (open reading frame), or any fragment specified, as described herein.

[0109] As a practical matter, whether any particular nucleic acid molecule or polypeptide is at least 80%, 85%, 90%, 95%, 96%, 97%, 98% or 99% identical to a nucleotide sequence of the present invention can be determined conventionally using known computer programs. A preferred method for determining the best overall match between a query sequence (a sequence of the present invention) and a subject sequence, also referred to as a global sequence alignment, can be determined using the FASTDB computer program based on the algorithm of Brutlag et al. (Comp. App. Biosci. 6:237-245 (1990)). In a sequence alignment the query and subject sequences are both DNA sequences. An RNA sequence can be compared by converting U's to T's. The result of said global sequence alignment is expressed as percent identity. Preferred parameters used in a FASTDB alignment of DNA sequences to calculate percent identity are: Matrix=Unitary, k-tuple=4, Mismatch Penalty=1, Joining Penalty=30, Randomization Group Length=0, Cutoff Score=1, Gap Penalty=5, Gap Size Penalty 0.05, Window Size=500 or the length of the subject nucleotide sequence, whichever is shorter.

[0110] If the subject sequence is shorter than the query sequence because of 5′ or 3′ deletions, not because of internal deletions, a manual correction must be made to the results. This is because the FASTDB program does not account for 5′ and 3′ truncations of the subject sequence when calculating percent identity. For subject sequences truncated at the 5′ or 3′ ends, relative to the query sequence, the percent identity is corrected by calculating the number of bases of the query sequence that are 5′ and 3′ of the subject sequence, which are not matched/aligned, as a percent of the total bases of the query sequence. Whether a nucleotide is matched/aligned is determined by results of the FASTDB sequence alignment. This percentage is then subtracted from the percent identity, calculated by the above FASTDB program using the specified parameters, to arrive at a final percent identity score. This corrected score is what is used for the purposes of the present invention. Only bases outside the 5′ and 3′ bases of the subject sequence, as displayed by the FASTDB alignment, which are not matched/aligned with the query sequence, are calculated for the purposes of manually adjusting the percent identity score.

[0111] For example, a 90 base subject sequence is aligned to a 100 base query sequence to determine percent identity. The deletions occur at the 5′ end of the subject sequence and therefore, the FASTDB alignment does not show a matched/alignment of the first 10 bases at 5′ end. The 10 unpaired bases represent 10% of the sequence (number of bases at the 5′ and 3′ ends not matched/total number of bases in the query sequence) so 10% is subtracted from the percent identity score calculated by the FASTDB program. If the remaining 90 bases were perfectly matched the final percent identity would be 90%. In another example, a 90 base subject sequence is compared with a 100 base query sequence. This time the deletions are internal deletions so that there are no bases on the 5′ or 3′ of the subject sequence which are not matched/aligned with the query. In this case the percent identity calculated by FASTDB is not manually corrected. Once again, only bases 5′ and 3′ of the subject sequence which are not matched/aligned with the query sequence are manually corrected for. No other manual corrections are to be made for the purposes of the present invention.

[0112] By a polypeptide having an amino acid sequence at least, for example, 95% “identical” to a query amino acid sequence of the present invention, it is intended that the amino acid sequence of the subject polypeptide is identical to the query sequence except that the subject polypeptide sequence may include up to five amino acid alterations per each 100 amino acids of the query amino acid sequence. In other words, to obtain a polypeptide having an amino acid sequence at least 95% identical to a query amino acid sequence, up to 5% of the amino acid residues in the subject sequence may be inserted, deleted, (indels) or substituted with another amino acid. These alterations of the reference sequence may occur at the amino or carboxy terminal positions of the reference amino acid sequence or anywhere between those terminal positions, interspersed either individually among residues in the reference sequence or in one or more contiguous groups within the reference sequence.

[0113] As a practical matter, whether any particular polypeptide is at least 80%, 85%, 90%, 95%, 96%, 97%, 98% or 99% identical to, for instance, the amino acid sequence of a polypeptide referred to in Table 1A (e.g., an amino acid sequence identified in columns 5 or 6) or Table 2 (e.g., the amino acid sequence of the polypeptide encoded by the polynucleotide sequence defined in columns 8 and 9 of Table 2) or a fragment thereof, the amino acid sequence of the polypeptide encoded by the polynucleotide sequence in SEQ ID NO:B as defined in column 6 of Table 1B or a fragment thereof, the amino acid sequence of the polypeptide encoded by the nucleotide sequence in SEQ ID NO:X or a fragment thereof, or an amino acid sequence of the polypeptide encoded by cDNA contained in Clone ID NO:Z, or a fragment thereof, can be determined conventionally using known computer programs. A preferred method for determining the best overall match between a query sequence (a sequence of the present invention) and a subject sequence, also referred to as a global sequence alignment, can be determined using the FASTDB computer program based on the algorithm of Brutlag et al. (Comp. App. Biosci.6:237-245 (1990)). In a sequence alignment the query and subject sequences are either both nucleotide sequences or both amino acid sequences. The result of said global sequence alignment is expressed as percent identity. Preferred parameters used in a FASTDB amino acid alignment are: Matrix=PAM 0, k-tuple=2, Mismatch Penalty=1, Joining Penalty=20, Randomization Group Length=0, Cutoff Score=1, Window Size=sequence length, Gap Penalty=5, Gap Size Penalty=0.05, Window Size=500 or the length of the subject amino acid sequence, whichever is shorter.

[0114] If the subject sequence is shorter than the query sequence due to N- or C-terminal deletions, not because of internal deletions, a manual correction must be made to the results. This is because the FASTDB program does not account for N- and C-terminal truncations of the subject sequence when calculating global percent identity. For subject sequences truncated at the N- and C-termini, relative to the query sequence, the percent identity is corrected by calculating the number of residues of the query sequence that are N- and C-terminal of the subject sequence, which are not matched/aligned with a corresponding subject residue, as a percent of the total bases of the query sequence. Whether a residue is matched/aligned is determined by results of the FASTDB sequence alignment. This percentage is then subtracted from the percent identity, calculated by the above FASTDB program using the specified parameters, to arrive at a final percent identity score. This final percent identity score is what is used for the purposes of the present invention. Only residues to the N- and C-termini of the subject sequence, which are not matched/aligned with the query sequence, are considered for the purposes of manually adjusting the percent identity score. That is, only query residue positions outside the farthest N- and C- terminal residues of the subject sequence.

[0115] For example, a 90 amino acid residue subject sequence is aligned with a 100 residue query sequence to determine percent identity. The deletion occurs at the N-terminus of the subject sequence and therefore, the FASTDB alignment does not show a matching/alignment of the first 10 residues at the N-terminus. The 10 unpaired residues represent 10% of the sequence (number of residues at the N- and C-termini not matched/total number of residues in the query sequence) so 10% is subtracted from the percent identity score calculated by the FASTDB program. If the remaining 90 residues were perfectly matched the final percent identity would be 90%. In another example, a 90 residue subject sequence is compared with a 100 residue query sequence. This time the deletions are internal deletions so there are no residues at the N- or C-termini of the subject sequence which are not matched/aligned with the query. In this case the percent identity calculated by FASTDB is not manually corrected. Once again, only residue positions outside the N- and C-terminal ends of the subject sequence, as displayed in the FASTDB alignment, which are not matched/aligned with the query sequence are manually corrected for. No other manual corrections are to be made for the purposes of the present invention.

[0116] The polynucleotide variants of the invention may contain alterations in the coding regions, non-coding regions, or both. Especially preferred are polynucleotide variants containing alterations, which produce silent substitutions, additions, or deletions, but do not alter the properties or activities of the encoded polypeptide. Nucleotide variants produced by silent substitutions due to the degeneracy of the genetic code are preferred. Moreover, polypeptide variants in which less than 50, less than 40, less than 30, less than 20, less than 10, or 5-50, 5-25, 5-10, 1-5, or 1-2 amino acids are substituted, deleted, or added in any combination are also preferred. Polynucleotide variants can be produced for a variety of reasons, e.g., to optimize codon expression for a particular host (change codons in the human mRNA to those preferred by a bacterial host such as E. coli).

[0117] Naturally occurring variants are called “allelic variants,” and refer to one of several alternate forms of a gene occupying a given locus on a chromosome of an organism. (Genes II, Lewin, B., ed., John Wiley & Sons, New York (1985).) These allelic variants can vary at either the polynucleotide and/or polypeptide level and are included in the present invention. Alternatively, non-naturally occurring variants may be produced by mutagenesis techniques or by direct synthesis.

[0118] Using known methods of protein engineering and recombinant DNA technology, variants may be generated to improve or alter the characteristics of the polypeptides of the present invention. For instance, one or more amino acids can be deleted from the N-terminus or C-terminus of the polypeptides of the present invention without substantial loss of biological function. As an example, the authors of Ron et al., J. Biol. Chem. 268: 2984-2988 (1993), reported variant KGF proteins having heparin binding activity even after deleting 3, 8, or 27 amino-terminal amino acid residues. Similarly, Interferon gamma exhibited up to ten times higher activity after deleting 8-10 amino acid residues from the carboxy terminus of this protein. (Dobeli et al., J. Biotechnology 7:199-216 (1988).)

[0119] Moreover, ample evidence demonstrates that variants often retain a biological activity similar to that of the naturally occurring protein. For example, Gayle and coworkers (J. Biol. Chem. 268:22105-22111 (1993)) conducted extensive mutational analysis of human cytokine IL-1a. They used random mutagenesis to generate over 3,500 individual IL-1a mutants that averaged 2.5 amino acid changes per variant over the entire length of the molecule. Multiple mutations were examined at every possible amino acid position. The investigators found that “[m]ost of the molecule could be altered with little effect on either [binding or biological activity].” In fact, only 23 unique amino acid sequences, out of more than 3,500 nucleotide sequences examined, produced a protein that significantly differed in activity from wild-type.

[0120] Furthermore, even if deleting one or more amino acids from the N-terminus or C-terminus of a polypeptide results in modification or loss of one or more biological functions, other biological activities may still be retained. For example, the ability of a deletion variant to induce and/or to bind antibodies which recognize the secreted form will likely be retained when less than the majority of the residues of the secreted form are removed from the N-terminus or C-terminus. Whether a particular polypeptide lacking N- or C-terminal residues of a protein retains such immunogenic activities can readily be determined by routine methods described herein and otherwise known in the art.

[0121] Thus, the invention further includes polypeptide variants which show a functional activity (e.g., biological activity) of the polypeptides of the invention. Such variants include deletions, insertions, inversions, repeats, and substitutions selected according to general rules known in the art so as have little effect on activity.

[0122] The present application is directed to nucleic acid molecules at least 80%, 85%, 90%, 95%, 96%, 97%, 98%, 99% or 100% identical to the nucleic acid sequences disclosed herein, (e.g., encoding a polypeptide having the amino acid sequence of an N and/or C terminal deletion), irrespective of whether they encode a polypeptide having functional activity. This is because even where a particular nucleic acid molecule does not encode a polypeptide having functional activity, one of skill in the art would still know how to use the nucleic acid molecule, for instance, as a hybridization probe or a polymerase chain reaction (PCR) primer. Uses of the nucleic acid molecules of the present invention that do not encode a polypeptide having functional activity include, inter alia, (1) isolating a gene or allelic or splice variants thereof in a cDNA library; (2) in situ hybridization (e.g., “FISH”) to metaphase chromosomal spreads to provide precise chromosomal location of the gene, as described in Verma et al., Human Chromosomes: A Manual of Basic Techniques, Pergamon Press, New York (1988); (3) Northern Blot analysis for detecting mRNA expression in specific tissues (e.g., normal lung or diseased lung tissues); and (4) in situ hybridization (e.g., histochemistry) for detecting mRNA expression in specific tissues (e.g., normal lung or diseased lung tissues).

[0123] Preferred, however, are nucleic acid molecules having sequences at least 80%, 85%, 90%, 95%, 96%, 97%, 98%, 99% or 100% identical to the nucleic acid sequences disclosed herein, which do, in fact, encode a polypeptide having functional activity. By a polypeptide having “functional activity” is meant, a polypeptide capable of displaying one or more known functional activities associated with a full-length (complete) protein of the invention. Such functional activities include, but are not limited to, biological activity, antigenicity [ability to bind (or compete with a polypeptide of the invention for binding) to an anti-polypeptide of the invention antibody], immunogenicity (ability to generate antibody which binds to a specific polypeptide of the invention), ability to form multimers with polypeptides of the invention, and ability to bind to a receptor or ligand for a polypeptide of the invention.

[0124] The functional activity of the polypeptides, and fragments, variants and derivatives of the invention, can be assayed by various methods.

[0125] For example, in one embodiment where one is assaying for the ability to bind or compete with full-length polypeptide of the present invention for binding to an anti-polypeptide of the invention antibody, various immunoassays known in the art can be used, including but not limited to, competitive and non-competitive assay systems using techniques such as radioimmunoassays, ELISA (enzyme linked immunosorbent assay), “sandwich” immunoassays, immunoradiometric assays, gel diffusion precipitation reactions, immunodiffusion assays, in situ immunoassays (using colloidal gold, enzyme or radioisotope labels, for example), western blots, precipitation reactions, agglutination assays (e.g., gel agglutination assays, hemagglutination assays), complement fixation assays, immunofluorescence assays, protein A assays, and immunoelectrophoresis assays, etc. In one embodiment, antibody binding is detected by detecting a label on the primary antibody. In another embodiment, the primary antibody is detected by detecting binding of a secondary antibody or reagent to the primary antibody. In a further embodiment, the secondary antibody is labeled. Many means are known in the art for detecting binding in an immunoassay and are within the scope of the present invention.

[0126] In another embodiment, where a ligand is identified, or the ability of a polypeptide fragment, variant or derivative of the invention to multimerize is being evaluated, binding can be assayed, e.g., by means well-known in the art, such as, for example, reducing and non-reducing gel chromatography, protein affinity chromatography, and affinity blotting. See generally, Phizicky et al., Microbiol. Rev. 59:94-123 (1995). In another embodiment, the ability of physiological correlates of a polypeptide of the present invention to bind to a substrate(s) of the polypeptide of the invention can be routinely assayed using techniques known in the art.

[0127] In addition, assays described herein (see Examples) and otherwise known in the art may routinely be applied to measure the ability of polypeptides of the present invention and fragments, variants and derivatives thereof to elicit polypeptide related biological activity (either in vitro or in vivo). Other methods will be known to the skilled artisan and are within the scope of the invention.

[0128] Of course, due to the degeneracy of the genetic code, one of ordinary skill in the art will immediately recognize that a large number of the nucleic acid molecules having a sequence at least 80%, 85%, 90%, 95%, 96%, 97%, 98%, 99%, or 100% identical to, for example, the nucleic acid sequence of the cDNA contained in Clone ID NO:Z, a nucleic acid sequence referred to in Table 1A (e.g., SEQ ID NO:X), a nucleic acid sequence disclosed in Table 2 (e.g., the nucleic acid sequence delineated in columns 8 and 9) or fragments thereof, will encode polypeptides “having functional activity.” In fact, since degenerate variants of any of these nucleotide sequences all encode the same polypeptide, in many instances, this will be clear to the skilled artisan even without performing the above described comparison assay. It will be further recognized in the art that, for such nucleic acid molecules that are not degenerate variants, a reasonable number will also encode a polypeptide having functional activity. This is because the skilled artisan is fully aware of amino acid substitutions that are either less likely or not likely to significantly effect protein function (e.g., replacing one aliphatic amino acid with a second aliphatic amino acid), as further described below.

[0129] For example, guidance concerning how to make phenotypically silent amino acid substitutions is provided in Bowie et al., “Deciphering the Message in Protein Sequences: Tolerance to Amino Acid Substitutions,” Science 247:1306-1310 (1990), wherein the authors indicate that there are two main strategies for studying the tolerance of an amino acid sequence to change.

[0130] The first strategy exploits the tolerance of amino acid substitutions by natural selection during the process of evolution. By comparing amino acid sequences in different species, conserved amino acids can be identified. These conserved amino acids are likely important for protein function. In contrast, the amino acid positions where substitutions have been tolerated by natural selection indicates that these positions are not critical for protein function. Thus, positions tolerating amino acid substitution could be modified while still maintaining biological activity of the protein.

[0131] The second strategy uses genetic engineering to introduce amino acid changes at specific positions of a cloned gene to identify regions critical for protein function. For example, site directed mutagenesis or alanine-scanning mutagenesis (introduction of single alanine mutations at every residue in the molecule) can be used. See Cunningham et al., Science 244:1081-1085 (1989). The resulting mutant molecules can then be tested for biological activity.

[0132] As the authors state, these two strategies have revealed that proteins are surprisingly tolerant of amino acid substitutions. The authors further indicate which amino acid changes are likely to be permissive at certain amino acid positions in the protein. For example, most buried (within the tertiary structure of the protein) amino acid residues require nonpolar side chains, whereas few features of surface side chains are generally conserved. Moreover, tolerated conservative amino acid substitutions involve replacement of the aliphatic or hydrophobic amino acids Ala, Val, Leu and Ile; replacement of the hydroxyl residues Ser and Thr; replacement of the acidic residues Asp and Glu; replacement of the amide residues Asn and Gln, replacement of the basic residues Lys, Arg, and His; replacement of the aromatic residues Phe, Tyr, and Trp, and replacement of the small-sized amino acids Ala, Ser, Thr, Met, and Gly. Besides conservative amino acid substitutions, variants of the present invention include (i) substitutions with one or more of the non-conserved amino acid residues, where the substituted amino acid residues may or may not be one encoded by the genetic code, or (ii) substitutions with one or more of the amino acid residues having a substituent group, or (iii) fusion of the mature polypeptide with another compound, such as a compound to increase the stability and/or solubility of the polypeptide (for example, polyethylene glycol), or (iv) fusion of the polypeptide with additional amino acids, such as, for example, an IgG Fc fusion region peptide, serum albumin (preferably human serum albumin) or a fragment or variant thereof, or leader or secretory sequence, or a sequence facilitating purification. Such variant polypeptides are deemed to be within the scope of those skilled in the art from the teachings herein.

[0133] For example, polypeptide variants containing amino acid substitutions of charged amino acids with other charged or neutral amino acids may produce proteins with improved characteristics, such as less aggregation. Aggregation of pharmaceutical formulations both reduces activity and increases clearance due to the aggregate's immunogenic activity. See Pinckard et al., Clin. Exp. Immunol. 2:331-340 (1967); Robbins et al., Diabetes 36: 838-845 (1987); Cleland et al., Crit. Rev. Therapeutic Drug Carrier Systems 10:307-377 (1993).

[0134] A further embodiment of the invention relates to polypeptides which comprise the amino acid sequence of a polypeptide having an amino acid sequence which contains at least one amino acid substitution, but not more than 50 amino acid substitutions, even more preferably, not more than 40 amino acid substitutions, still more preferably, not more than 30 amino acid substitutions, and still even more preferably, not more than 20 amino acid substitutions from a polypeptide sequence disclosed herein. Of course it is highly preferable for a polypeptide to have an amino acid sequence which comprises the amino acid sequence of a polypeptide of SEQ ID NO:Y, an amino acid sequence encoded by SEQ ID NO:X, an amino acid sequence encoded by the portion of SEQ ID NO:X as defined in columns 8 and 9 of Table 2, an amino acid sequence encoded by the complement of SEQ ID NO:X, and/or the amino acid sequence encoded by cDNA contained in Clone ID NO:Z which contains, in order of ever-increasing preference, at least one, but not more than 10, 9, 8, 7, 6, 5, 4, 3, 2 or 1 amino acid substitutions.

[0135] In specific embodiments, the polypeptides of the invention comprise, or alternatively, consist of, fragments or variants of a reference amino acid sequence selected from: (a) the amino acid sequence of SEQ ID NO:Y or fragments thereof (e.g., the mature form and/or other fragments described herein); (b) the amino acid sequence encoded by SEQ ID NO:X or fragments thereof; (c) the amino acid sequence encoded by the complement of SEQ ID NO:X or fragments thereof, (d) the amino acid sequence encoded by the portion of SEQ ID NO:X as defined in columns 8 and 9 of Table 2 or fragments thereof; and (e) the amino acid sequence encoded by cDNA contained in Clone ID NO:Z or fragments thereof; wherein the fragments or variants have 1-5, 5-10, 5-25, 5-50, 10-50 or 50-150, amino acid residue additions, substitutions, and/or deletions when compared to the reference amino acid sequence. In preferred embodiments, the amino acid substitutions are conservative. Polynucleotides encoding these polypeptides are also encompassed by the invention.

[0136] Polynucleotide and Polypeptide Fragments

[0137] The present invention is also directed to polynucleotide fragments of the polynucleotides (nucleic acids) of the invention. In the present invention, a “polynucleotide fragment” refers to a polynucleotide having a nucleic acid sequence which, for example: is a portion of the cDNA contained in Clone ID NO:Z or the complementary strand thereto; is a portion of the polynucleotide sequence encoding the polypeptide encoded by the cDNA contained in Clone ID NO:Z or the complementary strand thereto; is a portion of a polynucleotide sequence encoding the amino acid sequence encoded by the region of SEQ ID NO:X as defined in columns 8 and 9 of Table 2 or the complementary strand thereto; is a portion of the polynucleotide sequence of SEQ ID NO:X as defined in columns 8 and 9 of Table 2 or the complementary strand thereto; is a portion of the polynucleotide sequence in SEQ ID NO:X or the complementary strand thereto; is a polynucleotide sequence encoding a portion of the polypeptide of SEQ ID NO:Y; is a polynucleotide sequence encoding a portion of a polypeptide encoded by SEQ ID NO:X; is a polynucleotide sequence encoding a portion of a polypeptide encoded by the complement of the polynucleotide sequence in SEQ ID NO:X; is a portion of a polynucleotide sequence encoding the amino acid sequence encoded by the region of SEQ ID NO:B as defined in column 6 of Table 1B or the complementary strand thereto; or is a portion of the polynucleotide sequence of SEQ ID NO:B as defined in column 6 of Table 1B or the complementary strand thereto.

[0138] The polynucleotide fragments of the invention are preferably at least about 15 nt, and more preferably at least about 20 nt, still more preferably at least about 30 nt, and even more preferably, at least about 40 nt, at least about 50 nt, at least about 75 nt, or at least about 150 nt in length. A fragment “at least 20 nt in length,” for example, is intended to include 20 or more contiguous bases from the cDNA sequence contained in Clone ID NO:Z, or the nucleotide sequence shown in SEQ ID NO:X or the complementary stand thereto. In this context “about” includes the particularly recited value or a value larger or smaller by several (5, 4, 3, 2, or 1) nucleotides, at either terminus or at both termini. These nucleotide fragments have uses that include, but are not limited to, as diagnostic probes and primers as discussed herein. Of course, larger fragments (e.g., at least 160, 170, 180, 190, 200, 250, 500, 600, 1000, or 2000 nucleotides in length) are also encompassed by the invention.

[0139] Moreover, representative examples of polynucleotide fragments of the invention, comprise, or alternatively consist of, a sequence from about nucleotide number 1-50, 51-100, 101-150, 151-200, 201-250, 251-300, 301-350, 351-400, 401-450, 451-500, 501-550, 551-600, 651-700, 701-750, 751-800, 800-850, 851-900, 901-950, 951-1000, 1001-1050, 1051-1100, 1101-1150, 1151-1200, 1201-1250, 1251-1300, 1301-1350, 1351-1400, 1401-1450, 1451-1500, 1501-1550, 1551-1600, 1601-1650, 1651-1700, 1701-1750, 1751-1800, 1801-1850, 1851-1900, 1901-1950, 1951-2000, 2001-2050, 2051-2100, 2101-2150, 2151-2200, 2201-2250, 2251-2300, 2301-2350, 2351-2400, 2401-2450, 2451-2500, 2501-2550, 2551-2600, 2601-2650, 2651-2700, 2701-2750, 2751-2800, 2801-2850, 2851-2900, 2901-2950, 2951-3000, 3001-3050, 3051-3100, 3101-3150, 3151-3200, 3201-3250, 3251-3300, 3301-3350, 3351-3400, 3401-3450, 3451-3500, 3501-3550, 3551-3600, 3601-3650, 3651-3700, 3701-3750, 3751-3800, 3801-3850, 3851-3900, 3901-3950, 3951-4000, 4001-4050, 4051-4100, 4101-4150, 4151-4200, 4201-4250, 4251-4300, 4301-4350, 4351-4400, 4401-4450, 4451-4500, 4501-4550, 4551-4600, 4601-4650, 4651-4700, 4701-4750, 4751-4800, 4801-4850, 4851-4900, 4901-4950, 4951-5000, 5001-5050, 5051-5100, 5101-5150, 5151-5200, 5201-5250, 5251-5300, 5301-5350, 5351-5400, 5401-5450, 5451-5500, 5501-5550, 5551-5600, 5601-5650, 5651-5700, 5701-5750, 5751-5800, 5801-5850, 5851-5900, 5901-5950, 5951-6000, 6001-6050, 6051-6100, 6101-6150, 6151-6200, 6201-6250, 6251-6300, 6301-6350, 6351-6400, 6401-6450, 6451-6500, 6501-6550, 6551-6600, 6601-6650, 6651-6700, 6701-6750, 6751-6800, 6801-6850, 6851-6900, 6901-6950, 6951-7000, 7001-7050, 7051-7100, 7101-7150, 7151-7200, 7201-7250, 7251-7300 or 7301 to the end of SEQ ID NO:X, or the complementary strand thereto. In this context “about” includes the particularly recited range or a range larger or smaller by several (5, 4, 3, 2, or 1) nucleotides, at either terminus or at both termini. Preferably, these fragments encode a polypeptide, which has a functional activity (e.g., biological activity). More preferably, these polynucleotides can be used as probes or primers as discussed herein. Polynucleotides which hybridize to one or more of these polynucleotides under stringent hybridization conditions or alternatively, under lower stringency conditions are also encompassed by the invention, as are polypeptides encoded by these polynucleotides.

[0140] Further representative examples of polynucleotide fragments of the invention, comprise, or alternatively consist of, a sequence from about nucleotide number 1-50, 51-100, 101-150, 151-200, 201-250, 251-300, 301-350, 351-400, 401-450, 451-500, 501-550, 551-600, 651-700, 701-750, 751-800, 800-850, 851-900, 901-950, 951-1000, 1001-1050, 1051-1100, 1101-1150, 1151-1200, 1201-1250, 1251-1300, 1301-1350, 1351-1400, 1401-1450, 1451-1500, 1501-1550, 1551-1600, 1601-1650, 1651-1700, 1701-1750, 1751-1800, 1801-1850, 1851-1900, 1901-1950, 1951-2000, 2001-2050, 2051-2100, 2101-2150, 2151-2200, 2201-2250, 2251-2300, 2301-2350, 2351-2400, 2401-2450, 2451-2500, 2501-2550, 2551-2600, 2601-2650, 2651-2700, 2701-2750, 2751-2800, 2801-2850, 2851-2900, 2901-2950, 2951-3000, 3001-3050, 3051-3100, 3101-3150, 3151-3200, 3201-3250, 3251-3300, 3301-3350, 3351-3400, 3401-3450, 3451-3500, 3501-3550, 3551-3600, 3601-3650, 3651-3700, 3701-3750, 3751-3800, 3801-3850, 3851-3900, 3901-3950, 3951-4000, 4001-4050, 4051-4100, 4101-4150, 4151-4200, 4201-4250, 4251-4300, 4301-4350, 4351-4400, 4401-4450, 4451-4500, 4501-4550, 4551-4600, 4601-4650, 4651-4700, 4701-4750, 4751-4800, 4801-4850, 4851-4900, 4901-4950, 4951-5000, 5001-5050, 5051-5100, 5101-5150, 5151-5200, 5201-5250, 5251-5300, 5301-5350, 5351-5400, 5401-5450, 5451-5500, 5501-5550, 5551-5600, 5601-5650, 5651-5700, 5701-5750, 5751-5800, 5801-5850, 5851-5900, 5901-5950, 5951-6000, 6001-6050, 6051-6100, 6101-6150, 6151-6200, 6201-6250, 6251-6300, 6301-6350, 6351-6400, 6401-6450, 6451-6500, 6501-6550, 6551-6600, 6601-6650, 6651-6700, 6701-6750, 6751-6800, 6801-6850, 6851-6900, 6901-6950, 6951-7000, 7001-7050, 7051-7100, 7101-7150, 7151-7200, 7201-7250, 7251-7300 or 7301 to the end of the cDNA sequence contained in Clone ID NO:Z, or the complementary strand thereto. In this context “about” includes the particularly recited range or a range larger or smaller by several (5, 4, 3, 2, or 1) nucleotides, at either terminus or at both termini. Preferably, these fragments encode a polypeptide, which has a functional activity (e.g., biological activity). More preferably, these polynucleotides can be used as probes or primers as discussed herein. Polynucleotides which hybridize to one or more of these polynucleotides under stringent hybridization conditions or alternatively, under lower stringency conditions are also encompassed by the invention, as are polypeptides encoded by these polynucleotides.

[0141] Moreover, representative examples of polynucleotide fragments of the invention comprise, or alternatively consist of, a nucleic acid sequence comprising one, two, three, four, five, six, seven, eight, nine, ten, or more of the above described polynucleotide fragments of the invention in combination with a polynucleotide sequence delineated in Table 1B column 6. Additional, representative examples of polynucleotide fragments of the invention comprise, or alternatively consist of, a nucleic acid sequence comprising one, two, three, four, five, six, seven, eight, nine, ten, or more of the above described polynucleotide fragments of the invention in combination with a polynucleotide sequence that is the complementary strand of a sequence delineated in column 6 of Table 1B. In further embodiments, the above-described polynucleotide fragments of the invention comprise, or alternatively consist of, sequences delineated in Table 1B, column 6, and have a nucleic acid sequence which is different from that of the BAC fragment having the sequence disclosed in SEQ ID NO:B (see Table 1B, column 5). In additional embodiments, the above-described polynucleotide fragments of the invention comprise, or alternatively consist of, sequences delineated in Table 1B, column 6, and have a nucleic acid sequence which is different from that published for the BAC clone identified as BAC ID NO:A (see Table 1B, column 4). In additional embodiments, the above-described polynucleotides of the invention comprise, or alternatively consist of, sequences delineated Table 1B, column 6, and have a nucleic acid sequence which is different from that contained in the BAC clone identified as BAC ID NO:A (see Table 1B, column 4). Polypeptides encoded by these polynucleotides, other polynucleotides that encode these polypeptides, and antibodies that bind these polypeptides are also encompassed by the invention. Additionally, fragments and variants of the above-described polynucleotides and polypeptides are also encompassed by the invention.

[0142] In additional specific embodiments, polynucleotides of the invention comprise, or alternatively consist of, one, two, three, four, five, six, seven, eight, nine, ten, or more fragments of the sequences delineated in column 6 of Table 1B, and the polynucleotide sequence of SEQ ID NO:X (e.g., as defined in Table 1B, column 2) or fragments or variants thereof. Polypeptides encoded by these polynucleotides, other polynucleotides that encode these polypeptides, and antibodies that bind these polypeptides are also encompassed by the invention.

[0143] In additional specific embodiments, polynucleotides of the invention comprise, or alternatively consist of, one, two, three, four, five, six, seven, eight, nine, ten, or more fragments of the sequences delineated in column 6 of Table 1B which correspond to the same Clone ID NO:Z (see Table 1B, column 1), and the polynucleotide sequence of SEQ ID NO:X (e.g., as defined in Table 1A or 1B) or fragments or variants thereof. Polypeptides encoded by these polynucleotides, other polynucleotides that encode these polypeptides, and antibodies that bind these polypeptides are also encompassed by the invention.

[0144] In further specific embodiments, polynucleotides of the invention comprise, or alternatively consist of, one, two, three, four, five, six, seven, eight, nine, ten, or more fragments of the sequences delineated in the same row of column 6 of Table 1B, and the polynucleotide sequence of SEQ ID NO:X (e.g., as defined in Table 1A or 1B) or fragments or variants thereof. Polypeptides encoded by these polynucleotides, other polynucleotides that encode these polypeptides, and antibodies that bind these polypeptides are also encompassed by the invention.

[0145] In additional specific embodiments, polynucleotides of the invention comprise, or alternatively consist of a polynucleotide sequence in which the 3′ 10 polynucleotides of one of the sequences delineated in column 6 of Table 1B and the 5+ 10 polynucleotides of the sequence of SEQ ID NO:X are directly contiguous. Nucleic acids which hybridize to the complement of these 20 contiguous polynucleotides under stringent hybridization conditions or alternatively, under lower stringency conditions, are also encompassed by the invention. Polypeptides encoded by these polynucleotides and/or nucleic acids, other polynucleotides and/or nucleic acids that encode these polypeptides, and antibodies that bind these polypeptides are also encompassed by the invention. Additionally, fragments and variants of the above-described polynucleotides, nucleic acids, and polypeptides are also encompassed by the invention.

[0146] In additional specific embodiments, polynucleotides of the invention comprise, or alternatively consist of a polynucleotide sequence in which the 3′ 10 polynucleotides of one of the sequences delineated in column 6 of Table 1B and the 5′ 10 polynucleotides of a fragment or variant of the sequence of SEQ ID NO:X (e.g., as described herein) are directly contiguous Nucleic acids which hybridize to the complement of these 20 contiguous polynucleotides under stringent hybridization conditions or alternatively, under lower stringency conditions, are also encompassed by the invention. Polypeptides encoded by these polynucleotides and/or nucleic acids, other polynucleotides and/or nucleic acids encoding these polypeptides, and antibodies that bind these polypeptides are also encompassed by the invention. Additionally, fragments and variants of the above-described polynucleotides, nucleic acids, and polypeptides are also encompassed by the invention.

[0147] In further specific embodiments, polynucleotides of the invention comprise, or alternatively consist of a polynucleotide sequence in which the 3′ 10 polynucleotides of a fragment or variant of the sequence of SEQ ID NO:X and the 5′ 10 polynucleotides of the sequence of one of the sequences delineated in column 6 of Table 1B are directly contiguous. Nucleic acids which hybridize to the complement of these 20 contiguous polynucleotides under stringent hybridization conditions or alternatively, under lower stringency conditions, are also encompassed by the invention. Polypeptides encoded by these polynucleotides and/or nucleic acids, other polynucleotides and/or nucleic acids encoding these polypeptides, and antibodies that bind these polypeptides are also encompassed by the invention. Additionally, fragments and variants of the above-described polynucleotides, nucleic acids, and polypeptides are also encompassed by the invention.

[0148] In specific embodiments, polynucleotides of the invention comprise, or alternatively consist of a polynucleotide sequence in which the 3′ 10 polynucleotides of one of the sequences delineated in column 6 of Table 1B and the 5′ 10 polynucleotides of another sequence in column 6 are directly contiguous. In preferred embodiments, the 3′ 10 polynucleotides of one of the sequences delineated in column 6 of Table 1B is directly contiguous with the 5′ 10 polynucleotides of the next sequential exon delineated in Table 1B, column 6. Nucleic acids which hybridize to the complement of these 20 contiguous polynucleotides under stringent hybridization conditions or alternatively, under lower stringency conditions, are also encompassed by the invention. Polypeptides encoded by these polynucleotides and/or nucleic acids, other polynucleotides and/or nucleic acids encoding these polypeptides, and antibodies that bind these polypeptides are also encompassed by the invention. Additionally, fragments and variants of the above-described polynucleotides, nucleic acids, and polypeptides are also encompassed by the invention.

[0149] In the present invention, a “polypeptide fragment” refers to an amino acid sequence which is a portion of that contained in SEQ ID NO:Y, a portion of an amino acid sequence encoded by the portion of SEQ ID NO:X as defined in columns 8 and 9 of Table 2, a portion of an amino acid sequence encoded by the polynucleotide sequence of SEQ ID NO:X, a portion of an amino acid sequence encoded by the complement of the polynucleotide sequence in SEQ ID NO:X, and/or a portion of an amino acid sequence encoded by the cDNA contained in Clone ID NO:Z. Protein (polypeptide) fragments may be “free-standing,” or comprised within a larger polypeptide of which the fragment forms a part or region, most preferably as a single continuous region. Representative examples of polypeptide fragments of the invention, include, for example, fragments comprising, or alternatively consisting of, from about amino acid number 1-20, 21-40, 41-60, 61-80, 81-100, 102-120, 121-140, 141-160, 161-180, 181-200, 201-220, 221-240, 241-260, 261-280, 281-300, 301-320, 321-340, 341-360, 361-380, 381-400, 401-420, 421-440, 441-460, 461-480, 481-500, 501-520, 521-540, 541-560, 561-580, 581-600, 601-620, 621-640, 641-660, 661-680, 681-700, 701-720, 721-740, 741-760, 761-780, 781-800, 801-820, 821-840, 841-860, 861-880, 881-900, 901-920, 921-940, 941-960, 961-980, 981-1000, 1001-1020, 1021-1040, 1041-1060, 1061-1080, 1081-1100, 1101-1120, 1121-1140, 1141-1160, 1161-1180, 1181-1200, 1201-1220, 1221-1240, 1241-1260, 1261-1280, 1281-1300, 1301-1320, 1321-1340, 1341-1360, 1361-1380, 1381-1400, 1401-1420, 1421-1440, or 1441 to the end of the coding region. In a preferred embodiment, polypeptide fragments of the invention include, for example, fragments comprising, or alternatively consisting of, from about amino acid number 1-20, 21-40, 41-60, 61-80, 81-100, 102-120, 121-140, 141-160, 161-180, 181-200, 201-220, 221-240, 241-260, 261-280, 281-300, 301-320, 321-340, 341-360, 361-380, 381-400, 401-420, 421-440, 441-460, 461-480, 481-500, 501-520, 521-540, 541-560, 561-580, 581-600, 601-620, 621-640, 641-660, 661-680, 681-700, 701-720, 721-740, 741-760, 761-780, 781-800, 801-820, 821-840, 841-860, 861-880, 881-900, 901-920, 921-940, 941-960, 961-980, 981-1000, 1001-1020, 1021-1040, 1041-1060, 1061-1080, 1081-1100, 1101-1120, 1121-1140, 1141-1160, 1161-1180, 1181-1200, 1201-1220, 1221-1240, 1241-1260, 1261-1280, 1281-1300, 1301-1320, 1321-1340, 1341-1360, 1361-1380, 1381-1400, 1401-1420, 1421-1440, or 1441 to the end of the coding region of SEQ ID NO:Y. Moreover, polypeptide fragments of the invention may be at least about 10, 15, 20, 25, 30, 35, 40, 45, 50, 55, 60, 65, 70, 75, 80, 85, 90, 100, 110, 120, 130, 140, or 150 amino acids in length. In this context “about” includes the particularly recited ranges or values, or ranges or values larger or smaller by several (5, 4, 3, 2, or 1) amino acids, at either extreme or at both extremes. Polynucleotides encoding these polypeptide fragments are also encompassed by the invention.

[0150] Even if deletion of one or more amino acids from the N-terminus of a protein results in modification of loss of one or more biological functions of the protein, other functional activities (e.g., biological activities, ability to multimerize, ability to bind a ligand) may still be retained. For example, the ability of shortened muteins to induce and/or bind to antibodies which recognize the complete or mature forms of the polypeptides generally will be retained when less than the majority of the residues of the complete or mature polypeptide are removed from the N-terminus. Whether a particular polypeptide lacking N-terminal residues of a complete polypeptide retains such immunologic activities can readily be determined by routine methods described herein and otherwise known in the art. It is not unlikely that a mutein with a large number of deleted N-terminal amino acid residues may retain some biological or immunogenic activities. In fact, peptides composed of as few as six amino acid residues may often evoke an immune response.

[0151] Accordingly, polypeptide fragments include the secreted protein as well as the mature form. Further preferred polypeptide fragments include the secreted protein or the mature form having a continuous series of deleted residues from the amino or the carboxy terminus, or both. For example, any number of amino acids, ranging from 1-60, can be deleted from the amino terminus of either the secreted polypeptide or the mature form. Similarly, any number of amino acids, ranging from 1-30, can be deleted from the carboxy terminus of the secreted protein or mature form. Furthermore, any combination of the above amino and carboxy terminus deletions is preferred. Similarly, polynucleotides encoding these polypeptide fragments are also preferred.

[0152] The present invention further provides polypeptides having one or more residues deleted from the amino terminus of the amino acid sequence of a polypeptide disclosed herein (e.g., a polypeptide of SEQ ID NO:Y, a polypeptide encoded by the polynucleotide sequence contained in SEQ ID NO:X or the complement thereof, a polypeptide encoded by the portion of SEQ ID NO:X as defined in columns 8 and 9 of Table 2, a polypeptide encoded by the portion of SEQ ID NO:B as defined in column 6 of Table 1B, and/or a polypeptide encoded by the cDNA contained in Clone ID NO:Z). In particular, N-terminal deletions may be described by the general formula m−q, where q is a whole integer representing the total number of amino acid residues in a polypeptide of the invention (e.g., the polypeptide disclosed in SEQ ID NO:Y, or the polypeptide encoded by the portion of SEQ ID NO:X as defined in columns 8 and 9 of Table 2), and m is defined as any integer ranging from 2 to q-6. Polynucleotides encoding these polypeptides are also encompassed by the invention.

[0153] The present invention further provides polypeptides having one or more residues from the carboxy terminus of the amino acid sequence of a polypeptide disclosed herein (e.g., a polypeptide of SEQ ID NO:Y, a polypeptide encoded by the polynucleotide sequence contained in SEQ ID NO:X, a polypeptide encoded by the portion of SEQ ID NO:X as defined in columns 8 and 9 of Table 2, and/or a polypeptide encoded by the cDNA contained in Clone ID NO:Z). In particular, C-terminal deletions may be described by the general formula 1-n, where n is any whole integer ranging from 6 to q-1, and where n corresponds to the position of amino acid residue in a polypeptide of the invention. Polynucleotides encoding these polypeptides are also encompassed by the invention.

[0154] In addition, any of the above described N- or C-terminal deletions can be combined to produce a N- and C-terminal deleted polypeptide. The invention also provides polypeptides having one or more amino acids deleted from both the amino and the carboxyl termini, which may be described generally as having residues m-n of a polypeptide encoded by SEQ ID NO:X (e.g., including, but not limited to, the preferred polypeptide disclosed as SEQ ID NO:Y and the polypeptide encoded by the portion of SEQ ID NO:X as defined in columns 8 and 9 of Table 2), the cDNA contained in Clone ID NO:Z, and/or the complement thereof, where n and m are integers as described above. Polynucleotides encoding these polypeptides are also encompassed by the invention.

[0155] Also as mentioned above, even if deletion of one or more amino acids from the C-terminus of a protein results in modification of loss of one or more biological functions of the protein, other functional activities (e.g., biological activities, ability to multimerize, ability to bind a ligand) may still be retained. For example the ability of the shortened mutein to induce and/or bind to antibodies which recognize the complete or mature forms of the polypeptide generally will be retained when less than the majority of the residues of the complete or mature polypeptide are removed from the C-terminus. Whether a particular polypeptide lacking C-terminal residues of a complete polypeptide retains such immunologic activities can readily be determined by routine methods described herein and otherwise known in the art. It is not unlikely that a mutein with a large number of deleted C-terminal amino acid residues may retain some biological or immunogenic activities. In fact, peptides composed of as few as six amino acid residues may often evoke an immune response.

[0156] The present application is also directed to proteins containing polypeptides at least 80%, 85%, 90%, 95%, 96%, 97%, 98% or 99% identical to a polypeptide sequence set forth herein. In preferred embodiments, the application is directed to proteins containing polypeptides at least 80%, 85%, 90%, 95%, 96%, 97%, 98% or 99% identical to polypeptides having the amino acid sequence of the specific N- and C-terminal deletions. Polynucleotides encoding these polypeptides are also encompassed by the invention.

[0157] Any polypeptide sequence encoded by, for example, the polynucleotide sequences set forth as SEQ ID NO:X or the complement thereof, (presented, for example, in Tables 1A and 2), the cDNA contained in Clone ID NO:Z, or the polynucleotide sequence as defined in column 6 of Table 1B, may be analyzed to determine certain preferred regions of the polypeptide. For example, the amino acid sequence of a polypeptide encoded by a polynucleotide sequence of SEQ ID NO:X (e.g., the polypeptide of SEQ ID NO:Y and the polypeptide encoded by the portion of SEQ ID NO:X as defined in columns 8 and 9 of Table 2) or the cDNA contained in Clone ID NO:Z may be analyzed using the default parameters of the DNASTAR computer algorithm (DNASTAR, Inc., 1228 S. Park St., Madison, Wis. 53715 USA; http://www.dnastar.com/).

[0158] Polypeptide regions that may be routinely obtained using the DNASTAR computer algorithm include, but are not limited to, Gamier-Robson alpha-regions, beta-regions, turn-regions, and coil-regions; Chou-Fasman alpha-regions, beta-regions, and turn-regions; Kyte-Doolittle hydrophilic regions and hydrophobic regions; Eisenberg alpha- and beta-amphipathic regions; Karplus-Schulz flexible regions; Emini surface-forming regions; and Jameson-Wolf regions of high antigenic index. Among highly preferred polynucleotides of the invention in this regard are those that encode polypeptides comprising regions that combine several structural features, such as several (e.g., 1, 2, 3 or 4) of the features set out above.

[0159] Additionally, Kyte-Doolittle hydrophilic regions and hydrophobic regions, Emini surface-forming regions, and Jameson-Wolf regions of high antigenic index (i.e., containing four or more contiguous amino acids having an antigenic index of greater than or equal to 1.5, as identified using the default parameters of the Jameson-Wolf program) can routinely be used to determine polypeptide regions that exhibit a high degree of potential for antigenicity. Regions of high antigenicity are determined from data by DNASTAR analysis by choosing values which represent regions of the polypeptide which are likely to be exposed on the surface of the polypeptide in an environment in which antigen recognition may occur in the process of initiation of an immune response.

[0160] Preferred polypeptide fragments of the invention are fragments comprising, or alternatively, consisting of, an amino acid sequence that displays a functional activity (e.g. biological activity) of the polypeptide sequence of which the amino acid sequence is a fragment. By a polypeptide displaying a “functional activity” is meant a polypeptide capable of one or more known functional activities associated with a full-length protein, such as, for example, biological activity, antigenicity, immunogenicity, and/or multimerization, as described herein.

[0161] Other preferred polypeptide fragments are biologically active fragments. Biologically active fragments are those exhibiting activity similar, but not necessarily identical, to an activity of the polypeptide of the present invention. The biological activity of the fragments may include an improved desired activity, or a decreased undesirable activity.

[0162] In preferred embodiments, polypeptides of the invention comprise, or alternatively consist of, one, two, three, four, five or more of the antigenic fragments of the polypeptide of SEQ ID NO:Y, or portions thereof. Polynucleotides encoding these polypeptides are also encompassed by the invention.

[0163] The present invention encompasses polypeptides comprising, or alternatively consisting of, an epitope of: the polypeptide sequence shown in SEQ ID NO:Y; a polypeptide sequence encoded by SEQ ID NO:X or the complementary strand thereto; the polypeptide sequence encoded by the portion of SEQ ID NO:X as defined in columns 8 and 9 of Table 2; the polypeptide sequence encoded by the portion of SEQ ID NO:B as defined in column 6 of Table 1B or the complement thereto; the polypeptide sequence encoded by the cDNA contained in Clone ID NO:Z; or the polypeptide sequence encoded by a polynucleotide that hybridizes to the sequence of SEQ ID NO:X, the complement of the sequence of SEQ ID NO:X, the complement of a portion of SEQ ID NO:X as defined in columns 8 and 9 of Table 2, or the cDNA sequence contained in Clone ID NO:Z under stringent hybridization conditions or alternatively, under lower stringency hybridization as defined supra. The present invention further encompasses polynucleotide sequences encoding an epitope of a polypeptide sequence of the invention (such as, for example, the sequence disclosed in SEQ ID NO:X, or a fragment thereof), polynucleotide sequences of the complementary strand of a polynucleotide sequence encoding an epitope of the invention, and polynucleotide sequences which hybridize to the complementary strand under stringent hybridization conditions or alternatively, under lower stringency hybridization conditions defined supra.

[0164] The term “epitopes,” as used herein, refers to portions of a polypeptide having antigenic or immunogenic activity in an animal, preferably a mammal, and most preferably in a human. In a preferred embodiment, the present invention encompasses a polypeptide comprising an epitope, as well as the polynucleotide encoding this polypeptide. An “immunogenic epitope,” as used herein, is defined as a portion of a protein that elicits an antibody response in an animal, as determined by any method known in the art, for example, by the methods for generating antibodies described infra. (See, for example, Geysen et al., Proc. Natl. Acad. Sci. USA 81:3998-4002 (1983)). The term “antigenic epitope,” as used herein, is defined as a portion of a protein to which an antibody can immunospecifically bind its antigen as determined by any method well known in the art, for example, by the immunoassays described herein. Immunospecific binding excludes non-specific binding but does not necessarily exclude cross-reactivity with other antigens. Antigenic epitopes need not necessarily be immunogenic.

[0165] Fragments, which function as epitopes may be produced by any conventional means. (See, e.g., Houghten, R. A., Proc. Natl. Acad. Sci. USA 82:5131-5135 (1985) further described in U.S. Pat. No. 4,631,211.)

[0166] In the present invention, antigenic epitopes preferably contain a sequence of at least 4, at least 5, at least 6, at least 7, more preferably at least 8, at least 9, at least 10, at least 11, at least 12, at least 13, at least 14, at least 15, at least 20, at least 25, at least 30, at least 40, at least 50, and, most preferably, between about 15 to about 30 amino acids. Preferred polypeptides comprising immunogenic or antigenic epitopes are at least 10, 15, 20, 25, 30, 35, 40, 45, 50, 55, 60, 65, 70, 75, 80, 85, 90, 95, or 100 amino acid residues in length. Additional non-exclusive preferred antigenic epitopes include the antigenic epitopes disclosed herein, as well as portions thereof. Antigenic epitopes are useful, for example, to raise antibodies, including monoclonal antibodies, that specifically bind the epitope. Preferred antigenic epitopes include the antigenic epitopes disclosed herein, as well as any combination of two, three, four, five or more of these antigenic epitopes. Antigenic epitopes can be used as the target molecules in immunoassays. (See, for instance, Wilson et al., Cell 37:767-778 (1984); Sutcliffe et al., Science 219:660-666 (1983)).

[0167] Non-limiting examples of epitopes of polypeptides that can be used to generate antibodies of the invention include a polypeptide comprising, or alternatively consisting of, at least one, two, three, four, five, six or more of the portion(s) of SEQ ID NO:Y specified in column 6 of Table 1A. These polypeptide fragments have been determined to bear antigenic epitopes of the proteins of the invention by the analysis of the Jameson-Wolf antigenic index, which is included in the DNAStar suite of computer programs. By “comprise” it is intended that a polypeptide contains at least one, two, three, four, five, six or more of the portion(s) of SEQ ID NO:Y shown in column 6 of Table 1A, but it may contain additional flanking residues on either the amino or carboxyl termini of the recited portion. Such additional flanking sequences are preferably sequences naturally found adjacent to the portion; i.e., contiguous sequence shown in SEQ ID NO:Y. The flanking sequence may, however, be sequences from a heterologous polypeptide, such as from another protein described herein or from a heterologous polypeptide not described herein. In particular embodiments, epitope portions of a polypeptide of the invention comprise one, two, three, or more of the portions of SEQ ID NO:Y shown in column 6 of Table 1A. Polynucleotides encoding these polypeptides are also encompassed by the invention.

[0168] Similarly, immunogenic epitopes can be used, for example, to induce antibodies according to methods well known in the art. See, for instance, Sutcliffe et al., supra; Wilson et al., supra; Chow et al., Proc. Natl. Acad. Sci. USA 82:910-914; and Bittle et al., J. Gen. Virol. 66:2347-2354 (1985). Preferred immunogenic epitopes include the immunogenic epitopes disclosed herein, as well as any combination of two, three, four, five or more of these immunogenic epitopes. The polypeptides comprising one or more immunogenic epitopes may be presented for eliciting an antibody response together with a carrier protein, such as an albumin, to an animal system (such as rabbit or mouse), or, if the polypeptide is of sufficient length (at least about 25 amino acids), the polypeptide may be presented without a carrier. However, immunogenic epitopes comprising as few as 8 to 10 amino acids have been shown to be sufficient to raise antibodies capable of binding to, at the very least, linear epitopes in a denatured polypeptide (e.g., in Western blotting).

[0169] Epitope-bearing polypeptides of the present invention may be used to induce antibodies according to methods well known in the art including, but not limited to, in vivo immunization, in vitro immunization, and phage display methods. See, e.g., Sutcliffe et al., supra; Wilson et al., supra, and Bittle et al., J. Gen. Virol., 66:2347-2354 (1985). If in vivo immunization is used, animals may be immunized with free peptide; however, anti-peptide antibody titer may be boosted by coupling the peptide to a macromolecular carrier, such as keyhole limpet hemacyanin (KLH) or tetanus toxoid. For instance, peptides containing cysteine residues may be coupled to a carrier using a linker such as maleimidobenzoyl-N-hydroxysuccinimide ester (MBS), while other peptides may be coupled to carriers using a more general linking agent such as glutaraldehyde. Animals such as rabbits, rats and mice are immunized with either free or carrier-coupled peptides, for instance, by intraperitoneal and/or intradermal injection of emulsions containing about 100 μg of peptide or carrier protein and Freund's adjuvant or any other adjuvant known for stimulating an immune response. Several booster injections may be needed, for instance, at intervals of about two weeks, to provide a useful titer of anti-peptide antibody which can be detected, for example, by ELISA assay using free peptide adsorbed to a solid surface. The titer of anti-peptide antibodies in serum from an immunized animal may be increased by selection of anti-peptide antibodies, for instance, by adsorption to the peptide on a solid support and elution of the selected antibodies according to methods well known in the art.

[0170] As one of skill in the art will appreciate, and as discussed above, the polypeptides of the present invention (e.g., those comprising an immunogenic or antigenic epitope) can be fused to heterologous polypeptide sequences. For example, polypeptides of the present invention (including fragments or variants thereof), may be fused with the constant domain of immunoglobulins (IgA, IgE, IgG, IgM), or portions thereof (CH1, CH2, CH3, or any combination thereof and portions thereof, resulting in chimeric polypeptides. By way of another non-limiting example, polypeptides and/or antibodies of the present invention (including fragments or variants thereof) may be fused with albumin (including but not limited to recombinant human serum albumin or fragments or variants thereof (see, e.g., U.S. Pat. No. 5,876,969, issued Mar. 2, 1999, EP Patent 0 413 622, and U.S. Pat. No. 5,766,883, issued Jun. 16, 1998, herein incorporated by reference in their entirety)). In a preferred embodiment, polypeptides and/or antibodies of the present invention (including fragments or variants thereof) are fused with the mature form of human serum albumin (i.e., amino acids 1-585 of human serum albumin as shown in FIGS. 1 and 2 of EP Patent 0 322 094) which is herein incorporated by reference in its entirety. In another preferred embodiment, polypeptides and/or antibodies of the present invention (including fragments or variants thereof) are fused with polypeptide fragments comprising, or alternatively consisting of, amino acid residues 1-z of human serum albumin, where z is an integer from 369 to 419, as described in U.S. Pat. No. 5,766,883 herein incorporated by reference in its entirety. Polypeptides and/or antibodies of the present invention (including fragments or variants thereof) may be fused to either the N- or C-terminal end of the heterologous protein (e.g., immunoglobulin Fc polypeptide or human serum albumin polypeptide). Polynucleotides encoding fusion proteins of the invention are also encompassed by the invention.

[0171] Such fusion proteins as those described above may facilitate purification and may increase half-life in vivo. This has been shown for chimeric proteins consisting of the first two domains of the human CD4-polypeptide and various domains of the constant regions of the heavy or light chains of mammalian immunoglobulins. See, e.g., EP 394,827; Traunecker et al., Nature, 331:84-86 (1988). Enhanced delivery of an antigen across the epithelial barrier to the immune system has been demonstrated for antigens (e.g., insulin) conjugated to an FcRn binding partner such as IgG or Fc fragments (see, e.g., PCT Publications WO 96/22024 and WO 99/04813). IgG Fusion proteins that have a disulfide-linked dimeric structure due to the IgG portion desulfide bonds have also been found to be more efficient in binding and neutralizing other molecules than monomeric polypeptides or fragments thereof alone. See, e.g., Fountoulakis et al., J. Biochem., 270:3958-3964 (1995). Nucleic acids encoding the above epitopes can also be recombined with a gene of interest as an epitope tag (e.g., the hemagglutinin (HA) tag or flag tag) to aid in detection and purification of the expressed polypeptide. For example, a system described by Janknecht et al. allows for the ready purification of non-denatured fusion proteins expressed in human cell lines (Janknecht et al., 1991, Proc. Natl. Acad. Sci. USA 88:8972-897). In this system, the gene of interest is subcloned into a vaccinia recombination plasmid such that the open reading frame of the gene is translationally fused to an amino-terminal tag consisting of six histidine residues. The tag serves as a matrix binding domain for the fusion protein. Extracts from cells infected with the recombinant vaccinia virus are loaded onto Ni2+ nitriloacetic acid-agarose column and histidine-tagged proteins can be selectively eluted with imidazole-containing buffers.

[0172] Fusion Proteins

[0173] Any polypeptide of the present invention can be used to generate fusion proteins. For example, the polypeptide of the present invention, when fused to a second protein, can be used as an antigenic tag. Antibodies raised against the polypeptide of the present invention can be used to indirectly detect the second protein by binding to the polypeptide. Moreover, because secreted proteins target cellular locations based on trafficking signals, polypeptides of the present invention which are shown to be secreted can be used as targeting molecules once fused to other proteins.

[0174] Examples of domains that can be fused to polypeptides of the present invention include not only heterologous signal sequences, but also other heterologous functional regions. The fusion does not necessarily need to be direct, but may occur through linker sequences.

[0175] In certain preferred embodiments, proteins of the invention are fusion proteins comprising an amino acid sequence that is an N and/or C-terminal deletion of a polypeptide of the invention. In preferred embodiments, the invention is directed to a fusion protein comprising an amino acid sequence that is at least 80%, 85%, 90%, 95%, 96%, 97%, 98% or 99% identical to a polypeptide sequence of the invention. Polynucleotides encoding these proteins are also encompassed by the invention.

[0176] Moreover, fusion proteins may also be engineered to improve characteristics of the polypeptide of the present invention. For instance, a region of additional amino acids, particularly charged amino acids, may be added to the N-terminus of the polypeptide to improve stability and persistence during purification from the host cell or subsequent handling and storage. Also, peptide moieties may be added to the polypeptide to facilitate purification. Such regions may be removed prior to final preparation of the polypeptide. The addition of peptide moieties to facilitate handling of polypeptides is familiar and routine techniques in the art.

[0177] As one of skill in the art will appreciate that, as discussed above, polypeptides of the present invention, and epitope-bearing fragments thereof, can be combined with heterologous polypeptide sequences. For example, the polypeptides of the present invention may be fused with heterologous polypeptide sequences, for example, the polypeptides of the present invention may be fused with the constant domain of immunoglobulins (IgA, IgE, IgG, IgM) or portions thereof (CH1, CH2, CH3, and any combination thereof, including both entire domains and portions thereof), or albumin (including, but not limited to, native or recombinant human albumin or fragments or variants thereof (see, e.g., U.S. Pat. No. 5,876,969, issued Mar. 2, 1999, EP Patent 0 413 622, and U.S. Pat. No. 5,766,883, issued Jun. 16, 1998, herein incorporated by reference in their entirety)), resulting in chimeric polypeptides. For example, EP-A-0 464 533 (Canadian counterpart 2045869) discloses fusion proteins comprising various portions of constant region of immunoglobulin molecules together with another human protein or part thereof. In many cases, the Fc part in a fusion protein is beneficial in therapy and diagnosis, and thus can result in, for example, improved pharmacokinetic properties (EP-A 0232 262). Alternatively, deleting the Fc part after the fusion protein has been expressed, detected, and purified, would be desired. For example, the Fc portion may hinder therapy and diagnosis if the fusion protein is used as an antigen for immunizations. In drug discovery, for example, human proteins, such as hIL-5, have been fused with Fc portions for the purpose of high-throughput screening assays to identify antagonists of hIL-5. See, D. Bennett et al., J. Molecular Recognition 8:52-58 (1995); K. Johanson et al., J. Biol. Chem. 270:9459-9471 (1995).

[0178] Moreover, the polypeptides of the present invention can be fused to marker sequences, such as a polypeptide, which facilitates purification of the fused polypeptide. In preferred embodiments, the marker amino acid sequence is a hexa-histidine peptide, such as the tag provided in a pQE vector (QIAGEN, Inc., 9259 Eton Avenue, Chatsworth, Calif., 91311), among others, many of which are commercially available. As described in Gentz et al., Proc. Natl. Acad. Sci. USA 86:821-824 (1989), for instance, hexa-histidine provides for convenient purification of the fusion protein. Another peptide tag useful for purification, the “HA” tag, corresponds to an epitope derived from the influenza hemagglutinin protein (Wilson et al., Cell 37:767 (1984).)

[0179] Additional fusion proteins of the invention may be generated through the techniques of gene-shuffling, motif-shuffling, exon-shuffling, and/or codon-shuffling (collectively referred to as “DNA shuffling”), briefly described below, and further described herein. DNA shuffling may be employed to modulate the activities of polypeptides of the invention, such methods can be used to generate polypeptides with altered activity, as well as agonists and antagonists of the polypeptides. See, generally, U.S. Pat. Nos. 5,605,793; 5,811,238; 5,830,721; 5,834,252; and 5,837,458, and Patten et al., Curr. Opinion Biotechnol. 8:724-33 (1997); Harayama, Trends Biotechnol. 16(2):76-82 (1998); Hansson et al., J. Mol. Biol. 287:265-76 (1999); and Lorenzo and Blasco, Biotechniques 24(2):308-13 (1998); each of these patents and publications are hereby incorporated by reference in its entirety). In a preferred embodiment, one or more components, motifs, sections, parts, domains, fragments, etc., of a polynucleotide encoding a polypeptide of the invention may be recombined with one or more components, motifs, sections, parts, domains, fragments, etc., of one or more heterologous molecules encoding a heterologous polypeptide.

[0180] Thus, any of these above fusions can be engineered using the polynucleotides or the polypeptides of the present invention.

[0181] Recombinant and Synthetic Production of Polypeptides of the Invention

[0182] The present invention also relates to vectors containing the polynucleotide of the present invention, host cells, and the production of polypeptides by synthetic and recombinant techniques. The vector may be, for example, a phage, plasmid, viral, or retroviral vector. Retroviral vectors may be replication competent or replication defective. In the latter case, viral propagation generally will occur only in complementing host cells.

[0183] The polynucleotides of the invention may be joined to a vector containing a selectable marker for propagation in a host. Generally, a plasmid vector is introduced in a precipitate, such as a calcium phosphate precipitate, or in a complex with a charged lipid. If the vector is a virus, it may be packaged in vitro using an appropriate packaging cell line and then transduced into host cells.

[0184] The polynucleotide insert should be operatively linked to an appropriate promoter, such as the phage lambda PL promoter, the E. coli lac, trp, phoA and tac promoters, the SV40 early and late promoters and promoters of retroviral LTRs, to name a few. Other suitable promoters will be known to the skilled artisan. The expression constructs will further contain sites for transcription initiation, termination, and, in the transcribed region, a ribosome binding site for translation. The coding portion of the transcripts expressed by the constructs will preferably include a translation initiating codon at the beginning and a termination codon (UAA, UGA or UAG) appropriately positioned at the end of the polypeptide to be translated.

[0185] As indicated, the expression vectors will preferably include at least one selectable marker. Such markers include dihydrofolate reductase, G418 or neomycin resistance, glutamine synthase, for eukaryotic cell culture and tetracycline, kanamycin or ampicillin resistance genes for culturing in E. coli and other bacteria. Representative examples of appropriate hosts include, but are not limited to, bacterial cells, such as E. coli, Streptomyces and Salmonella typhimurium cells; fungal cells, such as yeast cells (e.g., Saccharomyces cerevisiae or Pichia pastoris (ATCC Accession No. 201178)); insect cells such as Drosophila S2 and Spodoptera Sf9 cells; animal cells such as CHO, COS, 293, NSO and Bowes melanoma cells; and plant cells. Appropriate culture mediums and conditions for the above-described host cells are known in the art.

[0186] Among vectors preferred for use in bacteria include pQE70, pQE60 and pQE-9, available from QIAGEN, Inc.; pBluescript vectors, Phagescript vectors, pNH8A, pNH16a, pNH18A, pNH46A, available from Stratagene Cloning Systems, Inc.; and ptrc99a, pKK223-3, pKK233-3, pDR540, pRIT5 available from Pharmacia Biotech, Inc. Among preferred eukaryotic vectors are pWLNEO, pSV2CAT, pOG44, pXT1 and pSG available from Stratagene; and pSVK3, pBPV, pMSG and pSVL available from Pharmacia. Preferred expression vectors for use in yeast systems include, but are not limited to pYES2, pYD1, pTEF1/Zeo, pYES2/GS, pPICZ, pGAPZ, pGAPZalph, pPIC9, pPIC3.5, pHIL-D2, pHIL-S1, pPIC3.5K, pPIC9K, and PAO815 (all available from Invitrogen, Carlsbad, Calif.). Other suitable vectors will be readily apparent to the skilled artisan.

[0187] Vectors, which use glutamine synthase (GS) or DHFR as the selectable markers can be amplified in the presence of the drugs methionine sulphoximine or methotrexate, respectively. An advantage of glutamine synthase based vectors is the availability of cell lines (e.g., the murine myeloma cell line, NSO) which are glutamine synthase negative. Glutamine synthase expression systems can also function in glutamine synthase expressing cells (e.g., Chinese Hamster Ovary (CHO) cells) by providing additional inhibitor to prevent the functioning of the endogenous gene. A glutamine synthase expression system and components thereof are detailed in PCT publications: WO87/04462; WO86/05807; WO89/01036; WO89/10404; and WO91/06657 which are hereby incorporated in their entireties by reference herein. Additionally, glutamine synthase expression vectors can be obtained from Lonza Biologics, Inc. (Portsmouth, N.H.). Expression and production of monoclonal antibodies using a GS expression system in murine myeloma cells is described in Bebbington et al., Bio/technology 10:169(1992) and in Biblia and Robinson Biotechnol. Prog. 11:1 (1995) which are herein incorporated by reference.

[0188] The present invention also relates to host cells containing the above-described vector constructs described herein, and additionally encompasses host cells containing nucleotide sequences of the invention that are operably associated with one or more heterologous control regions (e.g., promoter and/or enhancer) using techniques known of in the art. The host cell can be a higher eukaryotic cell, such as a mammalian cell (e.g., a human derived cell), or a lower eukaryotic cell, such as a yeast cell, or the host cell can be a prokaryotic cell, such as a bacterial cell. A host strain may be chosen, which modulates the expression of the inserted gene sequences, or modifies and processes the gene product in the specific fashion desired. Expression from certain promoters can be elevated in the presence of certain inducers; thus expression of the genetically engineered polypeptide may be controlled. Furthermore, different host cells have characteristics and specific mechanisms for the translational and post-translational processing and modification (e.g., phosphorylation, cleavage) of proteins. Appropriate cell lines can be chosen to ensure the desired modifications and processing of the foreign protein expressed.

[0189] Introduction of the nucleic acids and nucleic acid constructs of the invention into the host cell can be effected by calcium phosphate transfection, DEAE-dextran mediated transfection, cationic lipid-mediated transfection, electroporation, transduction, infection, or other methods. Such methods are described in many standard laboratory manuals, such as Davis et al., Basic Methods In Molecular Biology (1986). It is specifically contemplated that the polypeptides of the present invention may in fact be expressed by a host cell lacking a recombinant vector.

[0190] In addition to encompassing host cells containing the vector constructs discussed herein, the invention also encompasses primary, secondary, and immortalized host cells of vertebrate origin, particularly mammalian origin, that have been engineered to delete or replace endogenous genetic material (e.g., lung antigen coding sequence), and/or to include genetic material (e.g., heterologous polynucleotide sequences) that is operably associated with lung associated polynucleotides of the invention, and which activates, alters, and/or amplifies endogenous lung associated polynucleotides. For example, techniques known in the art may be used to operably associate heterologous control regions (e.g., promoter and/or enhancer) and endogenous lung associated polynucleotide sequences via homologous recombination (see, e.g., U.S. Pat. No. 5,641,670, issued Jun. 24, 1997; International Publication Number WO 96/29411; International Publication Number WO 94/12650; Koller et al., Proc. Natl. Acad. Sci. USA 86:8932-8935 (1989); and Zijlstra et al., Nature 342:435-438 (1989), the disclosures of each of which are incorporated by reference in their entireties).

[0191] Polypeptides of the present invention can also be recovered from: products purified from natural sources, including bodily fluids, tissues and cells, whether directly isolated or cultured; products of chemical synthetic procedures; and products produced by recombinant techniques from a prokaryotic or eukaryotic host, including, for example, bacterial, yeast, higher plant, insect, and mammalian cells. Depending upon the host employed in a recombinant production procedure, the polypeptides of the present invention may be glycosylated or may be non-glycosylated. In addition, polypeptides of the invention may also include an initial modified methionine residue, in some cases as a result of host-mediated processes. Thus, it is well known in the art that the N-terminal methionine encoded by the translation initiation codon generally is removed with high efficiency from any protein after translation in all eukaryotic cells. While the N-terminal methionine on most proteins also is efficiently removed in most prokaryotes, for some proteins, this prokaryotic removal process is inefficient, depending on the nature of the amino acid to which the N-terminal methionine is covalently linked.

[0192] In one embodiment, the yeast Pichia pastoris is used to express polypeptides of the invention in a eukaryotic system. Pichia pastoris is a methylotrophic yeast which can metabolize methanol as its sole carbon source. A main step in the methanol metabolization pathway is the oxidation of methanol to formaldehyde using O₂. This reaction is catalyzed by the enzyme alcohol oxidase. In order to metabolize methanol as its sole carbon source, Pichia pastoris must generate high levels of alcohol oxidase due, in part, to the relatively low affinity of alcohol oxidase for O₂. Consequently, in a growth medium depending on methanol as a main carbon source, the promoter region of one of the two alcohol oxidase genes (AOXl) is highly active. In the presence of methanol, alcohol oxidase produced from the AOXl gene comprises up to approximately 30% of the total soluble protein in Pichia pastoris. See, Ellis, S. B., et al., Mol. Cell. Biol. 5:1111-21 (1985); Koutz, P. J., et al., Yeast 5:167-77 (1989); Tschopp, J. F., et al., Nucl. Acids Res. 15:3859-76 (1987). Thus, a heterologous coding sequence, such as, for example, a polynucleotide of the present invention, under the transcriptional regulation of all or part of the AOXl regulatory sequence is expressed at exceptionally high levels in Pichia yeast grown in the presence of methanol.

[0193] In one example, the plasmid vector pPIC9K is used to express DNA encoding a polypeptide of the invention, as set forth herein, in a Pichea yeast system essentially as described in “Pichia Protocols: Methods in Molecular Biology,” D. R. Higgins and J. Cregg, eds. The Humana Press, Totowa, N.J., 1998. This expression vector allows expression and secretion of a polypeptide of the invention by virtue of the strong AOXl promoter linked to the Pichia pastoris alkaline phosphatase (PHO) secretory signal peptide (i.e., leader) located upstream of a multiple cloning site.

[0194] Many other yeast vectors could be used in place of pPIC9K, such as, pYES2, pYD1, pTEF1/Zeo, pYES2/GS, pPICZ, pGAPZ, pGAPZalpha, pPIC9, pPIC3.5, pHIL-D2, pHIL-S1, pPIC3.5K, and PAO815, as one skilled in the art would readily appreciate, as long as the proposed expression construct provides appropriately located signals for transcription, translation, secretion (if desired), and the like, including an in-frame AUG as required.

[0195] In another embodiment, high-level expression of a heterologous coding sequence, such as, for example, a polynucleotide of the present invention, may be achieved by cloning the heterologous polynucleotide of the invention into an expression vector such as, for example, pGAPZ or pGAPZalpha, and growing the yeast culture in the absence of methanol.

[0196] In addition to encompassing host cells containing the vector constructs discussed herein, the invention also encompasses primary, secondary, and immortalized host cells of vertebrate origin, particularly mammalian origin, that have been engineered to delete or replace endogenous genetic material (e.g., coding sequence), and/or to include genetic material (e.g., heterologous polynucleotide sequences) that is operably associated with polynucleotides of the invention, and which activates, alters, and/or amplifies endogenous polynucleotides. For example, techniques known in the art may be used to operably associate heterologous control regions (e.g., promoter and/or enhancer) and endogenous polynucleotide sequences via homologous recombination (see, e.g., U.S. Pat. No. 5,641,670, issued Jun. 24, 1997; International Publication No. WO 96/29411, published Sep. 26, 1996; International Publication No. WO 94/12650, published Aug. 4, 1994; Koller et al., Proc. Natl. Acad. Sci. USA 86:8932-8935 (1989); and Zijlstra et al., Nature 342:435-438 (1989), the disclosures of each of which are incorporated by reference in their entireties).

[0197] In addition, polypeptides of the invention can be chemically synthesized using techniques known in the art (e.g., see Creighton, 1983, Proteins: Structures and Molecular Principles, W.H. Freeman & Co., N.Y., and Hunkapiller et al., Nature, 310:105-111 (1984)). For example, a polypeptide corresponding to a fragment of a polypeptide can be synthesized by use of a peptide synthesizer. Furthermore, if desired, nonclassical amino acids or chemical amino acid analogs can be introduced as a substitution or addition into the polypeptide sequence. Non-classical amino acids include, but are not limited to, to the D-isomers of the common amino acids, 2,4-diaminobutyric acid, a-amino isobutyric acid, 4-aminobutyric acid, Abu, 2-amino butyric acid, g-Abu, e-Ahx, 6-amino hexanoic acid, Aib, 2-amino isobutyric acid, 3-amino propionic acid, ornithine, norleucine, norvaline, hydroxyproline, sarcosine, citrulline, homocitrulline, cysteic acid, t-butylglycine, t-butylalanine, phenylglycine, cyclohexylalanine, b-alanine, fluoro-amino acids, designer amino acids such as b-methyl amino acids, Ca-methyl amino acids, Na-methyl amino acids, and amino acid analogs in general. Furthermore, the amino acid can be D (dextrorotary) or L (levorotary).

[0198] The invention encompasses polypeptides of the present invention which are differentially modified during or after translation, e.g., by glycosylation, acetylation, phosphorylation, amidation, derivatization by known protecting/blocking groups, proteolytic cleavage, linkage to an antibody molecule or other cellular ligand, etc. Any of numerous chemical modifications may be carried out by known techniques, including but not limited, to specific chemical cleavage by cyanogen bromide, trypsin, chymotrypsin, papain, V8 protease, NaBH₄; acetylation, formylation, oxidation, reduction; metabolic synthesis in the presence of tunicamycin; etc.

[0199] Additional post-translational modifications encompassed by the invention include, for example, e.g., N-linked or O-linked carbohydrate chains, processing of N-terminal or C-terminal ends), attachment of chemical moieties to the amino acid backbone, chemical modifications of N-linked or O-linked carbohydrate chains, and addition or deletion of an N-terminal methionine residue as a result of procaryotic host cell expression. The polypeptides may also be modified with a detectable label, such as an enzymatic, fluorescent, isotopic or affinity label to allow for detection and isolation of the protein.

[0200] Examples of suitable enzymes include horseradish peroxidase, alkaline phosphatase, beta-galactosidase, or acetylcholinesterase; examples of suitable prosthetic group complexes include streptavidin/biotin and avidin/biotin; examples of suitable fluorescent materials include umbelliferone, fluorescein, fluorescein isothiocyanate, rhodamine, dichlorotriazinylamine fluorescein, dansyl chloride or phycoerythrin; an example of a luminescent material includes luminol; examples of bioluminescent materials include luciferase, luciferin, and aequorin; and examples of suitable radioactive material include iodine (¹²¹I, ¹²³I, ¹²⁵I, ¹³¹I), carbon (¹⁴C), sulfur (³⁵S), tritium (³H), indium (¹¹¹In, ¹¹²In, ^{113m}In, ^{115m}In), technetium (⁹⁹Tc, ^{99m}Tc), thallium (²⁰¹Ti), gallium (⁶⁸Ga, ⁶⁷Ga), palladium (¹⁰³Pd), molybdenum (⁹⁹Mo), xenon (¹³³Xe), fluorine (¹⁸F), ¹⁵³Sm, ¹⁷⁷Lu, ¹⁵⁹Gd, ¹⁴⁹Pm, ¹⁴⁰La, ¹⁷⁵Yb, ¹⁶⁶Ho, ⁹⁰Y, ⁴⁷Sc, ¹⁸⁶Re, ¹⁸⁸Re, ¹⁴²Pr, ¹⁰⁵Ph, and ⁹⁷Ru.

[0201] In specific embodiments, a polypeptide of the present invention or fragment or variant thereof is attached to macrocyclic chelators that associate with radiometal ions, including but not limited to, ¹⁷⁷Lu, ⁹⁰Y, ¹⁶⁶Ho, and ¹⁵³Sm, to polypeptides. In a preferred embodiment, the radiometal ion associated with the macrocyclic chelators is ¹¹¹In. In another preferred embodiment, the radiometal ion associated with the macrocyclic chelator is ⁹⁰Y. In specific embodiments, the macrocyclic chelator is 1,4,7,10-tetraazacyclododecane-N,N′,N″,N″′-tetraacetic acid (DOTA). In other specific embodiments, DOTA is attached to an antibody of the invention or fragment thereof via a linker molecule. Examples of linker molecules useful for conjugating DOTA to a polypeptide are commonly known in the art—see, for example, DeNardo et al., Clin Cancer Res. 4(10):2483-90 (1998); Peterson et al., Bioconjug. Chem. 10(4):553-7 (1999); and Zimmerman et al, Nucl. Med. Biol. 26(8):943-50 (1999); which are hereby incorporated by reference in their entirety.

[0202] As mentioned, the lung associated proteins of the invention may be modified by either natural processes, such as posttranslational processing, or by chemical modification techniques which are well known in the art. It will be appreciated that the same type of modification may be present in the same or varying degrees at several sites in a given lung associated polypeptide. Lung associated polypeptides may be branched, for example, as a result of ubiquitination, and they may be cyclic, with or without branching. Cyclic, branched, and branched cyclic lung associated polypeptides may result from posttranslation natural processes or may be made by synthetic methods. Modifications include acetylation, acylation, ADP-ribosylation, amidation, covalent attachment of flavin, covalent attachment of a heme moiety, covalent attachment of a nucleotide or nucleotide derivative, covalent attachment of a lipid or lipid derivative, covalent attachment of phosphotidylinositol, cross-linking, cyclization, disulfide bond formation, demethylation, formation of covalent cross-links, formation of cysteine, formation of pyroglutamate, formylation, gamma-carboxylation, glycosylation, GPI anchor formation, hydroxylation, iodination, methylation, myristoylation, oxidation, pegylation, proteolytic processing, phosphorylation, prenylation, racemization, selenoylation, sulfation, transfer-RNA mediated addition of amino acids to proteins such as arginylation, and ubiquitination. (See, for instance, PROTEINS—STRUCTURE AND MOLECULAR PROPERTIES, 2nd Ed., T. E. Creighton, W. H. Freeman and Company, New York (1993); POSTTRANSLATIONAL COVALENT MODIFICATION OF PROTEINS, B. C. Johnson, Ed., Academic Press, New York, pgs. 1-12 (1983); Seifter et al., Meth. Enzymol. 182:626-646 (1990); Rattan et al., Ann. N.Y. Acad. Sci. 663:48-62 (1992)).

[0203] Also provided by the invention are chemically modified derivatives of the polypeptides of the invention which may provide additional advantages such as increased solubility, stability and circulating time of the polypeptide, or decreased immunogenicity (see U.S. Pat. No. 4,179,337). The chemical moieties for derivitization may be selected from water soluble polymers such as polyethylene glycol, ethylene glycol/propylene glycol copolymers, carboxymethylcellulose, dextran, polyvinyl alcohol and the like. The polypeptides may be modified at random positions within the molecule, or at predetermined positions within the molecule and may include one, two, three or more attached chemical moieties.

[0204] The polymer may be of any molecular weight, and may be branched or unbranched. For polyethylene glycol, the preferred molecular weight is between about 1 kDa and about 100 kDa (the term “about” indicating that in preparations of polyethylene glycol, some molecules will weigh more, some less, than the stated molecular weight) for ease in handling and manufacturing. Other sizes may be used, depending on the desired therapeutic profile (e.g., the duration of sustained release desired, the effects, if any on biological activity, the ease in handling, the degree or lack of antigenicity and other known effects of the polyethylene glycol to a therapeutic protein or analog). For example, the polyethylene glycol may have an average molecular weight of about 200, 500, 1000, 1500, 2000, 2500, 3000, 3500, 4000, 4500, 5000, 5500, 6000, 6500, 7000, 7500, 8000, 8500, 9000, 9500, 10,000, 10,500, 11,000, 11,500, 12,000, 12,500, 13,000, 13,500, 14,000, 14,500, 15,000, 15,500, 16,000, 16,500, 17,000, 17,500, 18,000, 18,500, 19,000, 19,500, 20,000, 25,000, 30,000, 35,000, 40,000, 50,000, 55,000, 60,000, 65,000, 70,000, 75,000, 80,000, 85,000, 90,000, 95,000, or 100,000 kDa.

[0205] As noted above, the polyethylene glycol may have a branched structure. Branched polyethylene glycols are described, for example, in U.S. Pat. No. 5,643,575; Morpurgo et al., Appl. Biochem. Biotechnol. 56:59-72 (1996); Vorobjev et al., Nucleosides Nucleotides 18:2745-2750 (1999); and Caliceti et al., Bioconjug. Chem. 10:638-646 (1999), the disclosures of each of which are incorporated herein by reference.

[0206] The polyethylene glycol molecules (or other chemical moieties) should be attached to the protein with consideration of effects on functional or antigenic domains of the protein. There are a number of attachment methods available to those skilled in the art, such as, for example, the method disclosed in EP 0 401 384 (coupling PEG to G-CSF), herein incorporated by reference; see also Malik et al., Exp. Hematol. 20:1028-1035 (1992), reporting pegylation of GM-CSF using tresyl chloride. For example, polyethylene glycol may be covalently bound through amino acid residues via a reactive group, such as a free amino or carboxyl group. Reactive groups are those to which an activated polyethylene glycol molecule may be bound. The amino acid residues having a free amino group may include lysine residues and the N-terminal amino acid residues; those having a free carboxyl group may include aspartic acid residues glutamic acid residues and the C-terminal amino acid residue. Sulfhydryl groups may also be used as a reactive group for attaching the polyethylene glycol molecules. Preferred for therapeutic purposes is attachment at an amino group, such as attachment at the N-terminus or lysine group.

[0207] As suggested above, polyethylene glycol may be attached to proteins via linkage to any of a number of amino acid residues. For example, polyethylene glycol can be linked to proteins via covalent bonds to lysine, histidine, aspartic acid, glutamic acid, or cysteine residues. One or more reaction chemistries may be employed to attach polyethylene glycol to specific amino acid residues (e.g., lysine, histidine, aspartic acid, glutamic acid, or cysteine) of the protein or to more than one type of amino acid residue (e.g., lysine, histidine, aspartic acid, glutamic acid, cysteine and combinations thereof) of the protein.

[0208] One may specifically desire proteins chemically modified at the N-terminus. Using polyethylene glycol as an illustration of the present composition, one may select from a variety of polyethylene glycol molecules (by molecular weight, branching, etc.), the proportion of polyethylene glycol molecules to protein (polypeptide) molecules in the reaction mix, the type of pegylation reaction to be performed, and the method of obtaining the selected N-terminally pegylated protein. The method of obtaining the N-terminally pegylated preparation (i.e., separating this moiety from other monopegylated moieties if necessary) may be by purification of the N-terminally pegylated material from a population of pegylated protein molecules. Selective proteins chemically modified at the N-terminus modification may be accomplished by reductive alkylation which exploits differential reactivity of different types of primary amino groups (lysine versus the N-terminal) available for derivatization in a particular protein. Under the appropriate reaction conditions, substantially selective derivatization of the protein at the N-terminus with a carbonyl group containing polymer is achieved.

[0209] As indicated above, pegylation of the proteins of the invention may be accomplished by any number of means. For example, polyethylene glycol may be attached to the protein either directly or by an intervening linker. Linkerless systems for attaching polyethylene glycol to proteins are described in Delgado et al., Crit. Rev. Thera. Drug Carrier Sys. 9:249-304 (1992); Francis et al., Intern. J. of Hematol. 68:1-18 (1998); U.S. Pat. No. 4,002,531; U.S. Pat. No. 5,349,052; WO 95/06058; and WO 98/32466, the disclosures of each of which are incorporated herein by reference.

[0210] One system for attaching polyethylene glycol directly to amino acid residues of proteins without an intervening linker employs tresylated MPEG, which is produced by the modification of monmethoxy polyethylene glycol (MPEG) using tresylchloride (ClSO₂CH₂CF₃). Upon reaction of protein with tresylated MPEG, polyethylene glycol is directly attached to amine groups of the protein. Thus, the invention includes protein-polyethylene glycol conjugates produced by reacting proteins of the invention with a polyethylene glycol molecule having a 2,2,2-trifluoreothane sulphonyl group.

[0211] Polyethylene glycol can also be attached to proteins using a number of different intervening linkers. For example, U.S. Pat. No. 5,612,460, the entire disclosure of which is incorporated herein by reference, discloses urethane linkers for connecting polyethylene glycol to proteins. Protein-polyethylene glycol conjugates wherein the polyethylene glycol is attached to the protein by a linker can also be produced by reaction of proteins with compounds such as MPEG-succinimidylsuccinate, MPEG activated with 1,1′-carbonyldlimidazole, MPEG-2,4,5-trichloropenylcarbonate, MPEG-p-nitrophenolcarbonate, and various MPEG-succinate derivatives. A number of additional polyethylene glycol derivatives and reaction chemistries for attaching polyethylene glycol to proteins are described in International Publication No. WO 98/32466, the entire disclosure of which is incorporated herein by reference. Pegylated protein products produced using the reaction chemistries set out herein are included within the scope of the invention.

[0212] The number of polyethylene glycol moieties attached to each protein of the invention (i.e., the degree of substitution) may also vary. For example, the pegylated proteins of the invention may be linked, on average, to 1, 2, 3, 4, 5, 6, 7, 8, 9, 10, 12, 15, 17, 20, or more polyethylene glycol molecules. Similarly, the average degree of substitution within ranges such as 1-3, 2-4, 3-5, 4-6, 5-7, 6-8, 7-9, 8-10, 9-11, 10-12, 11-13, 12-14, 13-15, 14-16, 15-17, 16-18, 17-19, or 18-20 polyethylene glycol moieties per protein molecule. Methods for determining the degree of substitution are discussed, for example, in Delgado et al., Crit. Rev. Thera. Drug Carrier Sys. 9:249-304 (1992).

[0213] The lung associated polypeptides of the invention can be recovered and purified from chemical synthesis and recombinant cell cultures by standard methods which include, but are not limited to, ammonium sulfate or ethanol precipitation, acid extraction, anion or cation exchange chromatography, phosphocellulose chromatography, hydrophobic interaction chromatography, affinity chromatography, hydroxylapatite chromatography and lectin chromatography. Most preferably, high performance liquid chromatography (“HPLC”) is employed for purification. Well known techniques for refolding protein may be employed to regenerate active conformation when the polypeptide is denatured during isolation and/or purification.

[0214] Lung associated polynucleotides and polypeptides may be used in accordance with the present invention for a variety of applications, particularly those that make use of the chemical and biological properties of lung associated antigens. Among these are applications in the detection, prevention, diagnosis and/or treatment of diseases associated with lung, such as e.g., allergic disorders (eosinophilic pneumonia, hypersensitivity pneumonitis (e.g., extrinsic allergic alveolitis, allergic interstitial pneumonitis, organic dust pneumoconiosis), asthma), pneumonia (e.g., bacterial, viral , fungal, atypical, and opportunistic infection), pleural disorders (e.g., pleurisy, pleural effusion, and pneumothorax), obstructive airway diseases (e.g., asthma, chronic obstructive pulmonary disease (COPD), emphysema, chronic or acute bronchitis), occupational lung diseases (e.g., silicosis, black lung, occupational asthsma, byssinosis, and benign pneumoconioses), Infiltrative Lung Disease (e.g., pulmonary fibrosis, idiopathic pulmonary fibrosis, and desquamative interstitial pneumonia), histiocytosis X, sarcoidosis and pulmonary alveolar proteinosis), Acute respiratory distress syndrome (also called, e.g., adult respiratory distress syndrome), edema, pulmonary embolism, bronchitis (e.g., viral, bacterial), bronchiectasis, atelectasis, lung abscess, cystic fibrosis, neoplasms and/or cancers of the lung, including, but not limited to, squamous cell carcinoma, small cell (oat cell) carcinoma, large cell carcinoma, and adenocarcinoma, and/or those disorders associated with the lung as described under “Respiratory Disorders” below. Additional applications relate to diagnosis and to treatment of disorders of cells, tissues and organisms. These aspects of the invention are discussed further below.

[0215] In a preferred embodiment, polynucleotides expressed in a particular tissue type are used to detect, diagnose, treat, prevent and/or prognose disorders associated with the tissue type.

[0216] The polypeptides of the invention may be in monomers or multimers (i.e., dimers, trimers, tetramers and higher multimers). Accordingly, the present invention relates to monomers and multimers of the polypeptides of the invention, their preparation, and compositions (preferably, Therapeutics) containing them. In specific embodiments, the polypeptides of the invention are monomers, dimers, trimers or tetramers. In additional embodiments, the multimers of the invention are at least dimers, at least trimers, or at least tetramers.

[0217] Multimers encompassed by the invention may be homomers or heteromers. As used herein, the term homomer refers to a multimer containing only polypeptides corresponding to a protein of the invention (e.g., the amino acid sequence of SEQ ID NO:Y, an amino acid sequence encoded by SEQ ID NO:X or the complement of SEQ ID NO:X, the amino acid sequence encoded by the portion of SEQ ID NO:X as defined in columns 8 and 9 of Table 2, and/or an amino acid sequence encoded by cDNA contained in Clone ID NO:Z (including fragments, variants, splice variants, and fusion proteins, corresponding to these as described herein)). These homomers may contain polypeptides having identical or different amino acid sequences. In a specific embodiment, a homomer of the invention is a multimer containing only polypeptides having an identical amino acid sequence. In another specific embodiment, a homomer of the invention is a multimer containing polypeptides having different amino acid sequences. In specific embodiments, the multimer of the invention is a homodimer (e.g., containing two polypeptides having identical or different amino acid sequences) or a homotrimer (e.g., containing three polypeptides having identical and/or different amino acid sequences). In additional embodiments, the homomeric multimer of the invention is at least a homodimer, at least a homotrimer, or at least a homotetramer.

[0218] As used herein, the term heteromer refers to a multimer containing two or more heterologous polypeptides (i.e., polypeptides of different proteins) in addition to the polypeptides of the invention. In a specific embodiment, the multimer of the invention is a heterodimer, a heterotrimer, or a heterotetramer. In additional embodiments, the heteromeric multimer of the invention is at least a heterodimer, at least a heterotrimer, or at least a heterotetramer.

[0219] Multimers of the invention may be the result of hydrophobic, hydrophilic, ionic and/or covalent associations and/or may be indirectly linked by, for example, liposome formation. Thus, in one embodiment, multimers of the invention, such as, for example, homodimers or homotrimers, are formed when polypeptides of the invention contact one another in solution. In another embodiment, heteromultimers of the invention, such as, for example, heterotrimers or heterotetramers, are formed when polypeptides of the invention contact antibodies to the polypeptides of the invention (including antibodies to the heterologous polypeptide sequence in a fusion protein of the invention) in solution. In other embodiments, multimers of the invention are formed by covalent associations with and/or between the polypeptides of the invention. Such covalent associations may involve one or more amino acid residues contained in the polypeptide sequence (e.g., that recited in SEQ ID NO:Y, encoded by the portion of SEQ ID NO:X as defined in columns 8 and 9 of Table 2, and/or encoded by the cDNA contained in Clone ID NO:Z). In one instance, the covalent associations are cross-linking between cysteine residues located within the polypeptide sequences which interact in the native (i.e., naturally occurring) polypeptide. In another instance, the covalent associations are the consequence of chemical or recombinant manipulation. Alternatively, such covalent associations may involve one or more amino acid residues contained in the heterologous polypeptide sequence in a fusion protein. In one example, covalent associations are between the heterologous sequence contained in a fusion protein of the invention (see, e.g., U.S. Pat. No. 5,478,925). In a specific example, the covalent associations are between the heterologous sequence contained in a Fc fusion protein of the invention (as described herein). In another specific example, covalent associations of fusion proteins of the invention are between heterologous polypeptide sequence from another protein that is capable of forming covalently associated multimers, such as for example, osteoprotegerin (see, e.g., International Publication NO: WO 98/49305, the contents of which are herein incorporated by reference in its entirety). In another embodiment, two or more polypeptides of the invention are joined through peptide linkers. Examples include those peptide linkers described in U.S. Pat. No. 5,073,627 (hereby incorporated by reference). Proteins comprising multiple polypeptides of the invention separated by peptide linkers may be produced using conventional recombinant DNA technology.

[0220] Another method for preparing multimer polypeptides of the invention involves use of polypeptides of the invention fused to a leucine zipper or isoleucine zipper polypeptide sequence. Leucine zipper and isoleucine zipper domains are polypeptides that promote multimerization of the proteins in which they are found. Leucine zippers were originally identified in several DNA-binding proteins (Landschulz et al., Science 240:1759, (1988)), and have since been found in a variety of different proteins. Among the known leucine zippers are naturally occurring peptides and derivatives thereof that dimerize or trimerize. Examples of leucine zipper domains suitable for producing soluble multimeric proteins of the invention are those described in PCT application WO 94/10308, hereby incorporated by reference. Recombinant fusion proteins comprising a polypeptide of the invention fused to a polypeptide sequence that dimerizes or trimerizes in solution are expressed in suitable host cells, and the resulting soluble multimeric fusion protein is recovered from the culture supernatant using techniques known in the art.

[0221] Trimeric polypeptides of the invention may offer the advantage of enhanced biological activity. Preferred leucine zipper moieties and isoleucine moieties are those that preferentially form trimers. One example is a leucine zipper derived from lung surfactant protein D (SPD), as described in Hoppe et al. (FEBS Letters 344:191, (1994)) and in U.S. patent application Ser. No. 08/446,922, hereby incorporated by reference. Other peptides derived from naturally occurring trimeric proteins may be employed in preparing trimeric polypeptides of the invention.

[0222] In another example, proteins of the invention are associated by interactions between Flag® polypeptide sequence contained in fusion proteins of the invention containing Flag® polypeptide sequence. In a further embodiment, proteins of the invention are associated by interactions between heterologous polypeptide sequence contained in Flag® fusion proteins of the invention and anti-Flag® antibody.

[0223] The multimers of the invention may be generated using chemical techniques known in the art. For example, polypeptides desired to be contained in the multimers of the invention may be chemically cross-linked using linker molecules and linker molecule length optimization techniques known in the art (see, e.g., U.S. Pat. No. 5,478,925, which is herein incorporated by reference in its entirety). Additionally, multimers of the invention may be generated using techniques known in the art to form one or more inter-molecule cross-links between the cysteine residues located within the sequence of the polypeptides desired to be contained in the multimer (see, e.g., U.S. Pat. No. 5,478,925, which is herein incorporated by reference in its entirety). Further, polypeptides of the invention may be routinely modified by the addition of cysteine or biotin to the C-terminus or N-terminus of the polypeptide and techniques known in the art may be applied to generate multimers containing one or more of these modified polypeptides (see, e.g., U.S. Pat. No. 5,478,925, which is herein incorporated by reference in its entirety). Additionally, techniques known in the art may be applied to generate liposomes containing the polypeptide components desired to be contained in the multimer of the invention (see, e.g., U.S. Pat. No. 5,478,925, which is herein incorporated by reference in its entirety).

[0224] Alternatively, multimers of the invention may be generated using genetic engineering techniques known in the art. In one embodiment, polypeptides contained in multimers of the invention are produced recombinantly using fusion protein technology described herein or otherwise known in the art (see, e.g., U.S. Pat. No. 5,478,925, which is herein incorporated by reference in its entirety). In a specific embodiment, polynucleotides coding for a homodimer of the invention are generated by ligating a polynucleotide sequence encoding a polypeptide of the invention to a sequence encoding a linker polypeptide and then further to a synthetic polynucleotide encoding the translated product of the polypeptide in the reverse orientation from the original C-terminus to the N-terminus (lacking the leader sequence) (see, e.g., U.S. Pat. No. 5,478,925, which is herein incorporated by reference in its entirety). In another embodiment, recombinant techniques described herein or otherwise known in the art are applied to generate recombinant polypeptides of the invention which contain a transmembrane domain (or hydrophobic or signal peptide) and which can be incorporated by membrane reconstitution techniques into liposomes (see, e.g., U.S. Pat. No. 5,478,925, which is herein incorporated by reference in its entirety).

[0225] Antibodies

[0226] Further polypeptides of the invention relate to antibodies and T-cell antigen receptors (TCR) which immunospecifically bind a polypeptide, polypeptide fragment, or variant of the invention (e.g., a polypeptide or fragment or variant of the amino acid sequence of SEQ ID NO:Y or a polypeptide encoded by the cDNA contained in Clone ID NO:Z, and/or an epitope, of the present invention) as determined by immunoassays well known in the art for assaying specific antibody-antigen binding. Antibodies of the invention include, but are not limited to, polyclonal, monoclonal, multispecific, human, humanized or chimeric antibodies, single chain antibodies, Fab fragments, F(ab′) fragments, fragments produced by a Fab expression library, anti-idiotypic (anti-Id) antibodies (including, e.g., anti-Id antibodies to antibodies of the invention), intracellularly-made antibodies (i.e., intrabodies), and epitope-binding fragments of any of the above. The term “antibody,” as used herein, refers to immunoglobulin molecules and immunologically active portions of immunoglobulin molecules, i.e., molecules that contain an antigen binding site that immunospecifically binds an antigen. The immunoglobulin molecules of the invention can be of any type (e.g., IgG, IgE, IgM, IgD, IgA and IgY), class (e.g., IgG1, IgG2, IgG3, IgG4, IgA1 and IgA2) or subclass of immunoglobulin molecule. In preferred embodiments, the immunoglobulin molecules of the invention are IgG1. In other preferred embodiments, the immunoglobulin molecules of the invention are IgG4.

[0227] Most preferably the antibodies are human antigen-binding antibody fragments of the present invention and include, but are not limited to, Fab, Fab′ and F(ab′)2, Fd, single-chain Fvs (scFv), single-chain antibodies, disulfide-linked Fvs (sdFv) and fragments comprising either a VL or VH domain. Antigen-binding antibody fragments, including single-chain antibodies, may comprise the variable region(s) alone or in combination with the entirety or a portion of the following: hinge region, CH1, CH2, and CH3 domains. Also included in the invention are antigen-binding fragments also comprising any combination of variable region(s) with a hinge region, CH1, CH2, and CH3 domains. The antibodies of the invention may be from any animal origin including birds and mammals. Preferably, the antibodies are human, murine (e.g., mouse and rat), donkey, ship rabbit, goat, guinea pig, camel, horse, or chicken. As used herein, “human” antibodies include antibodies having the amino acid sequence of a human immunoglobulin and include antibodies isolated from human immunoglobulin libraries or from animals transgenic for one or more human immunoglobulin and that do not express endogenous immunoglobulins, as described infra and, for example in, U.S. Pat. No. 5,939,598 by Kucherlapati et al.

[0228] The antibodies of the present invention may be monospecific, bispecific, trispecific or of greater multispecificity. Multispecific antibodies may be specific for different epitopes of a polypeptide of the present invention or may be specific for both a polypeptide of the present invention as well as for a heterologous epitope, such as a heterologous polypeptide or solid support material. See, e.g., PCT publications WO 93/17715; WO 92/08802; WO 91/00360; WO 92/05793; Tutt, et al., J. Immunol. 147:60-69 (1991); U.S. Pat. Nos. 4,474,893; 4,714,681; 4,925,648; 5,573,920; 5,601,819; Kostelny et al., J. Immunol. 148:1547-1553 (1992).

[0229] Antibodies of the present invention may be described or specified in terms of the epitope(s) or portion(s) of a polypeptide of the present invention which they recognize or specifically bind. The epitope(s) or polypeptide portion(s) may be specified as described herein, e.g., by N-terminal and C-terminal positions, or by size in contiguous amino acid residues, or listed in the Tables and Figures. Preferred epitopes of the invention include those shown in column 6 of Table 1A, as well as polynucleotides that encode these epitopes. Antibodies, which specifically bind any epitope or polypeptide of the present invention may also be excluded. Therefore, the present invention includes antibodies that specifically bind polypeptides of the present invention, and allows for the exclusion of the same.

[0230] Antibodies of the present invention may also be described or specified in terms of their cross-reactivity. Antibodies that do not bind any other analog, ortholog, or homolog of a polypeptide of the present invention are included. Antibodies that bind polypeptides with at least 95%, at least 90%, at least 85%, at least 80%, at least 75%, at least 70%, at least 65%, at least 60%, at least 55%, and at least 50% identity (as calculated using methods known in the art and described herein) to a polypeptide of the present invention are also included in the present invention. In specific embodiments, antibodies of the present invention cross-react with murine, rat and/or rabbit homologs of human proteins and the corresponding epitopes thereof. Antibodies that do not bind polypeptides with less than 95%, less than 90%, less than 85%, less than 80%, less than 75%, less than 70%, less than 65%, less than 60%, less than 55%, and less than 50% identity (as calculated using methods known in the art and described herein) to a polypeptide of the present invention are also included in the present invention. In a specific embodiment, the above-described cross-reactivity is with respect to any single specific antigenic or immunogenic polypeptide, or combination(s) of 2, 3, 4, 5, or more of the specific antigenic and/or immunogenic polypeptides disclosed herein. Further included in the present invention are antibodies which bind polypeptides encoded by polynucleotides which hybridize to a polynucleotide of the present invention under stringent hybridization conditions (as described herein). Antibodies of the present invention may also be described or specified in terms of their binding affinity to a polypeptide of the invention. Preferred binding affinities include those with a dissociation constant or Kd less than 5×10⁻² M, 10⁻² M, 5×10⁻³ M, 10⁻³ M, 5×10⁻⁴ M, 10⁻⁴ M, 5×10⁻⁵ M, 10⁻⁵ M, 5×10⁻⁶ M, 10⁻⁶ M, 5×10⁻⁷ M, 10⁷ M, 5×10⁻⁸ M, 10⁻⁸ M, 5×10⁻⁹ M, 10⁻⁹ M, 5×10⁻¹⁰ M, 10⁻¹⁰ M, 5×10⁻¹¹ M, 10⁻¹¹ M, 5×10⁻¹² M, 10⁻¹² M, 5×10⁻¹³ M, 10⁻¹³ M, 5×10⁻¹⁴ M, 10⁻¹⁴ M, 5×10⁻¹⁵ M, or 10⁻¹⁵ M.

[0231] The invention also provides antibodies that competitively inhibit binding of an antibody to an epitope of the invention as determined by any method known in the art for determining competitive binding, for example, the immunoassays described herei-n. In preferred embodiments, the antibody competitively inhibits binding to the epitope by at least 95%, at least 90%, at least 85%, at least 80%, at least 75%, at least 70%, at least 60%, or at least 50%.

[0232] Antibodies of the present invention may act as agonists or antagonists of the polypeptides of the present invention. For example, the present invention includes antibodies which disrupt the receptor/ligand interactions with the polypeptides of the invention either partially or fully. Preferably, antibodies of the present invention bind an antigenic epitope disclosed herein, or a portion thereof. The invention features both receptor-specific antibodies and ligand-specific antibodies. The invention also features receptor-specific antibodies, which do not prevent ligand binding but prevent receptor activation. Receptor activation (i.e., signaling) may be determined by techniques described herein or otherwise known in the art. For example, receptor activation can be determined by detecting the phosphorylation (e.g., tyrosine or serine/threonine) of the receptor or its substrate by immunoprecipitation followed by western blot analysis (for example, as described supra). In specific embodiments, antibodies are provided that inhibit ligand activity or receptor activity by at least 95%, at least 90%, at least 85%, at least 80%, at least 75%, at least 70%, at least 60%, or at least 50% of the activity in absence of the antibody.

[0233] The invention also features receptor-specific antibodies which both prevent ligand binding and receptor activation as well as antibodies that recognize the receptor-ligand complex, and, preferably, do not specifically recognize the unbound receptor or the unbound ligand. Likewise, included in the invention are neutralizing antibodies which bind the ligand and prevent binding of the ligand to the receptor, as well as antibodies which bind the ligand, thereby preventing receptor activation, but do not prevent the ligand from binding the receptor. Further included in the invention are antibodies, which activate the receptor. These antibodies may act as receptor agonists, i.e., potentiate or activate either all or a subset of the biological activities of the ligand-mediated receptor activation, for example, by inducing dimerization of the receptor. The antibodies may be specified as agonists, antagonists or inverse agonists for biological activities comprising the specific biological activities of the peptides of the invention disclosed herein. The above antibody agonists can be made using methods known in the art. See, e.g., PCT publication WO 96/40281; U.S. Pat. No. 5,811,097; Deng et al., Blood 92(6):1981-1988 (1998); Chen et al., Cancer Res. 58(16):3668-3678 (1998); Harrop et al., J. Immunol. 161(4):1786-1794 (1998); Zhu et al., Cancer Res. 58(15):3209-3214 (1998); Yoon et al., J. Immunol. 160(7):3170-3179 (1998); Prat et al., J. Cell. Sci. 111(Pt2):237-247 (1998); Pitard et al., J. Immunol. Methods 205(2):177-190 (1997); Liautard et al., Cytokine 9(4):233-241 (1997); Carlson et al., J. Biol. Chem. 272(17):11295-11301 (1997); Taryman et al., Neuron 14(4):755-762 (1995); Muller et al., Structure 6(9):1153-1167 (1998); Bartunek et al., Cytokine 8(1):14-20 (1996) (which are all incorporated by reference herein in their entireties).

[0234] Antibodies of the present invention may be used, for example, to purify, detect, and target the polypeptides of the present invention, including both in vitro and in vivo diagnostic and therapeutic methods. For example, the antibodies have utility in immunoassays for qualitatively and quantitatively measuring levels of the polypeptides of the present invention in biological samples. See, e.g., Harlow et al., Antibodies: A Laboratory Manual, (Cold Spring Harbor Laboratory Press, 2nd ed. 1988); incorporated by reference herein in its entirety.

[0235] As discussed in more detail below, the antibodies of the present invention may be used either alone or in combination with other compositions. The antibodies may further be recombinantly fused to a heterologous polypeptide at the N- or C-terminus or chemically conjugated (including covalent and non-covalent conjugations) to polypeptides or other compositions. For example, antibodies of the present invention may be recombinantly fused or conjugated to molecules useful as labels in detection assays and effector molecules such as heterologous polypeptides, drugs, radionuclides, or toxins. See, e.g., PCT publications WO 92/08495; WO 91/14438; WO 89/12624; U.S. Pat. No. 5,314,995; and EP 396,387; the disclosures of which are incorporated herein by reference in their entireties.

[0236] The antibodies of the invention include derivatives that are modified, i.e., by the covalent attachment of any type of molecule to the antibody such that covalent attachment does not prevent the antibody from generating an anti-idiotypic response. For example, but not by way of limitation, the antibody derivatives include antibodies that have been modified, e.g., by glycosylation, acetylation, pegylation, phosphylation, amidation, derivatization by known protecting/blocking groups, proteolytic cleavage, linkage to a cellular ligand or other protein, etc. Any of numerous chemical modifications may be carried out by known techniques, including, but not limited to specific chemical cleavage, acetylation, formylation, metabolic synthesis of tunicamycin, etc. Additionally, the derivative may contain one or more non-classical amino acids.

[0237] The antibodies of the present invention may be generated by any suitable method known in the art. Polyclonal antibodies to an antigen-of-interest can be produced by various procedures well known in the art. For example, a polypeptide of the invention can be administered to various host animals including, but not limited to, rabbits, mice, rats, etc. to induce the production of sera containing polyclonal antibodies specific for the antigen. Various adjuvants may be used to increase the immunological response, depending on the host species, and include but are not limited to, Freund's (complete and incomplete), mineral gels such as aluminum hydroxide, surface active substances such as lysolecithin, pluronic polyols, polyanions, peptides, oil emulsions, keyhole limpet hemocyanins, dinitrophenol, and potentially useful human adjuvants such as BCG (bacille Calmette-Guerin) and corynebacterium parvum. Such adjuvants are also well known in the art.

[0238] Monoclonal antibodies can be prepared using a wide variety of techniques known in the art including the use of hybridoma, recombinant, and phage display technologies, or a combination thereof. For example, monoclonal antibodies can be produced using hybridoma techniques including those known in the art and taught, for example, in Harlow et al., Antibodies: A Laboratory Manual, (Cold Spring Harbor Laboratory Press, 2nd ed. 1988); Hammerling, et al., in: Monoclonal Antibodies and T-Cell Hybridomas 563-681 (Elsevier, N.Y., 1981) (said references incorporated by reference in their entireties). The term “monoclonal antibody” as used herein is not limited to antibodies produced through hybridoma technology. The term “monoclonal antibody” refers to an antibody that is derived from a single clone, including any eukaryotic, prokaryotic, or phage clone, and not the method by which it is produced.

[0239] Methods for producing and screening for specific antibodies using hybridoma technology are routine and well known in the art and are discussed in detail in the Examples. In a non-limiting example, mice can be immunized with a polypeptide of the invention or a cell expressing such peptide. Once an immune response is detected, e.g., antibodies specific for the antigen are detected in the mouse serum, the mouse spleen is harvested and splenocytes isolated. The splenocytes are then fused by well known techniques to any suitable myeloma cells, for example cells from cell line SP20 available from the ATCC. Hybridomas are selected and cloned by limited dilution. The hybridoma clones are then assayed by methods known in the art for cells that secrete antibodies capable of binding a polypeptide of the invention. Ascites fluid, which generally contains high levels of antibodies, can be generated by immunizing mice with positive hybridoma clones.

[0240] Accordingly, the present invention provides methods of generating monoclonal antibodies as well as antibodies produced by the method comprising culturing a hybridoma cell secreting an antibody of the invention wherein, preferably, the hybridoma is generated by fusing splenocytes isolated from a mouse immunized with an antigen of the invention with myeloma cells and then screening the hybridomas resulting from the fusion for hybridoma clones that secrete an antibody able to bind a polypeptide of the invention.

[0241] Another well known method for producing both polyclonal and monoclonal human B cell lines is transformation using Epstein Barr Virus (EBV). Protocols for generating EBV-transformed B cell lines are commonly known in the art, such as, for example, the protocol outlined in Chapter 7.22 of Current Protocols in Immunology, Coligan et al., Eds., 1994, John Wiley & Sons, NY, which is hereby incorporated in its entirety by reference herein. The source of B cells for transformation is commonly human peripheral blood, but B cells for transformation may also be derived from other sources including, but not limited to, lymph nodes, tonsil, spleen, tumor tissue, and infected tissues. Tissues are generally made into single cell suspensions prior to EBV transformation. Additionally, steps may be taken to either physically remove or inactivate T cells (e.g., by treatment with cyclosporin A) in B cell-containing samples, because T cells from individuals seropositive for anti-EBV antibodies can suppress B cell immortalization by EBV.

[0242] In general, the sample containing human B cells is innoculated with EBV, and cultured for 3-4 weeks. A typical source of EBV is the culture supernatant of the B95-8 cell line (ATCC #VR-1492). Physical signs of EBV transformation can generally be seen towards the end of the 3-4 week culture period. By phase-contrast microscopy, transformed cells may appear large, clear, hairy and tend to aggregate in tight clusters of cells. Initially, EBV lines are generally polyclonal. However, over prolonged periods of cell cultures, EBV lines may become monoclonal or polyclonal as a result of the selective outgrowth of particular B cell clones. Alternatively, polyclonal EBV transformed lines may be subcloned (e.g., by limiting dilution culture) or fused with a suitable fusion partner and plated at limiting dilution to obtain monoclonal B cell lines. Suitable fusion partners for EBV transformed cell lines include mouse myeloma cell lines (e.g., SP2/0, X63-Ag8.653), heteromyeloma cell lines (human x mouse; e.g, SPAM-8, SBC-H20, and CB-F7), and human cell lines (e.g., GM 1500, SKO-007, RPMI 8226, and KR-4). Thus, the present invention also provides a method of generating polyclonal or monoclonal human antibodies against polypeptides of the invention or fragments thereof, comprising EBV-transformation of human B cells.

[0243] Antibody fragments, which recognize specific epitopes may be generated by known techniques. For example, Fab and F(ab′)2 fragments of the invention may be produced by proteolytic cleavage of immunoglobulin molecules, using enzymes such as papain (to produce Fab fragments) or pepsin (to produce F(ab′)2 fragments). F(ab′)2 fragments contain the variable region, the light chain constant region and the CH1 domain of the heavy chain. For example, the antibodies of the present invention can also be generated using various phage display methods known in the art and as discussed in detail in the Examples (e.g., Example 10). In phage display methods, functional antibody domains are displayed on the surface of phage particles, which carry the polynucleotide sequences encoding them. In a particular embodiment, such phage can be utilized to display antigen binding domains expressed from a repertoire or combinatorial antibody library (e.g., human or murine). Phage expressing an antigen binding domain that binds the antigen of interest can be selected or identified with antigen, e.g., using labeled antigen or antigen bound or captured to a solid surface or bead. Phage used in these methods are typically filamentous phage including fd and M13 binding domains expressed from phage with Fab, Fv or disulfide stabilized Fv antibody domains recombinantly fused to either the phage gene III or gene VIII protein. Examples of phage display methods that can be used to make the antibodies of the present invention include those disclosed in Brinkman et al., J. Immunol. Methods 182:41-50 (1995); Ames et al., J. Immunol. Methods 184:177-186 (1995); Kettleborough et al., Eur. J. Immunol. 24:952-958 (1994); Persic et al., Gene 187 9-18 (1997); Burton et al., Advances in Immunology 57:191-280 (1994); PCT application No. PCT/GB91/01134; PCT publications WO 90/02809; WO 91/10737; WO 92/01047; WO 92/18619; WO 93/11236; WO 95/15982; WO 95/20401; and U.S. Pat. Nos. 5,698,426; 5,223,409; 5,403,484; 5,580,717; 5,427,908; 5,750,753; 5,821,047; 5,571,698; 5,427,908; 5,516,637; 5,780,225; 5,658,727; 5,733,743 and 5,969,108; each of which is incorporated herein by reference in its entirety.

[0244] As described in the above references, after phage selection, the antibody coding regions from the phage can be isolated and used to generate whole antibodies, including human antibodies, or any other desired antigen binding fragment, and expressed in any desired host, including mammalian cells, insect cells, plant cells, yeast, and bacteria, e.g., as described in detail below. For example, techniques to recombinantly produce Fab, Fab′ and F(ab′)2 fragments can also be employed using methods known in the art such as those disclosed in PCT publication WO 92/22324; Mullinax et al., BioTechniques 12(6):864-869 (1992); and Sawai et al., AJRI 34:26-34 (1995); and Better et al., Science 240:1041-1043 (1988) (said references incorporated by reference in their entireties).

[0245] Examples of techniques which can be used to produce single-chain Fvs and antibodies include those described in U.S. Pat. Nos. 4,946,778 and 5,258,498; Huston et al., Methods in Enzymology 203:46-88 (1991); Shu et al., PNAS 90:7995-7999 (1993); and Skerra et al., Science 240:1038-1040 (1988). For some uses, including in vivo use of antibodies in humans and in vitro detection assays, it may be preferable to use chimeric, humanized, or human antibodies. A chimeric antibody is a molecule in which different portions of the antibody are derived from different animal species, such as antibodies having a variable region derived from a murine monoclonal antibody and a human immunoglobulin constant region. Methods for producing chimeric antibodies are known in the art. See e.g., Morrison, Science 229:1202 (1985); Oi et al., BioTechniques 4:214 (1986); Gillies et al., (1989) J. Immunol. Methods 125:191-202; U.S. Pat. Nos. 5,807,715; 4,816,567; and 4,816397, which are incorporated herein by reference in their entirety. Humanized antibodies are antibody molecules from non-human species antibody that binds the desired antigen having one or more complementarity determining regions (CDRs) from the non-human species and a framework regions from a human immunoglobulin molecule. Often, framework residues in the human framework regions will be substituted with the corresponding residue from the CDR donor antibody to alter, preferably improve, antigen binding. These framework substitutions are identified by methods well known in the art, e.g., by modeling of the interactions of the CDR and framework residues to identify framework residues important for antigen binding and sequence comparison to identify unusual framework residues at particular positions. (See, e.g., Queen et al., U.S. Pat. No. 5,585,089; Riechmann et al., Nature 332:323 (1988), which are incorporated herein by reference in their entireties.) Antibodies can be humanized using a variety of techniques known in the art including, for example, CDR-grafting (EP 239,400; PCT publication WO 91/09967; U.S. Pat. Nos. 5,225,539; 5,530,101; and 5,585,089), veneering or resurfacing (EP 592,106; EP 519,596; Padlan, Molecular Immunology 28(4/5):489-498 (1991); Studnicka et al., Protein Engineering 7(6):805-814 (1994); Roguska. et al., PNAS 91:969-973 (1994)), and chain shuffling (U.S. Pat. No. 5,565,332).

[0246] Completely human antibodies are particularly desirable for therapeutic treatment of human patients. Human antibodies can be made by a variety of methods known in the art including phage display methods described above using antibody libraries derived from human immunoglobulin sequences. See also, U.S. Pat. Nos. 4,444,887 and 4,716,111; and PCT publications WO 98/46645, WO 98/50433, WO 98/24893, WO 98/16654, WO 96/34096, WO 96/33735, and WO 91/10741; each of which is incorporated herein by reference in its entirety.

[0247] Human antibodies can also be produced using transgenic mice which are incapable of expressing functional endogenous immunoglobulins, but which can express human immunoglobulin genes. For example, the human heavy and light chain immunoglobulin gene complexes may be introduced randomly or by homologous recombination into mouse embryonic stem cells. Alternatively, the human variable region, constant region, and diversity region may be introduced into mouse embryonic stem cells in addition to the human heavy and light chain genes. The mouse heavy and light chain immunoglobulin genes may be rendered non-functional separately or simultaneously with the introduction of human immunoglobulin loci by homologous recombination. In particular, homozygous deletion of the JH region prevents endogenous antibody production. The modified embryonic stem cells are expanded and microinjected into blastocysts to produce chimeric mice. The chimeric mice are then bred to produce homozygous offspring, which express human antibodies. The transgenic mice are immunized in the normal fashion with a selected antigen, e.g., all or a portion of a polypeptide of the invention. Monoclonal antibodies directed against the antigen can be obtained from the immunized, transgenic mice using conventional hybridoma technology. The human immunoglobulin transgenes harbored by the transgenic mice rearrange during B cell differentiation, and subsequently undergo class switching and somatic mutation. Thus, using such a technique, it is possible to produce therapeutically useful IgG, IgA, IgM and IgE antibodies. For an overview of this technology for producing human antibodies, see Lonberg and Huszar, Int. Rev. Immunol. 13:65-93 (1995). For a detailed discussion of this technology for producing human antibodies and human monoclonal antibodies and protocols for producing such antibodies, see, e.g., PCT publications WO 98/24893; WO 92/01047; WO 96/34096; WO 96/33735; European Pat. No. 0 598 877; U.S. Pat. Nos. 5,413,923; 5,625,126; 5,633,425; 5,569,825; 5,661,016; 5,545,806; 5,814,318; 5,885,793; 5,916,771; 5,939,598; 6,075,181 and 6,114,598, which are incorporated by reference herein in their entirety. In addition, companies such as Abgenix, Inc. (Freemont, Calif.) and Genpharm (San Jose, Calif.) can be engaged to provide human antibodies directed against a selected antigen using technology similar to that described above.

[0248] Completely human antibodies which recognize a selected epitope can be generated using a technique referred to as “guided selection.” In this approach a selected non-human monoclonal antibody, e.g., a mouse antibody, is used to guide the selection of a completely human antibody recognizing the same epitope. (Jespers et al., Bio/technology 12:899-903 (1988)).

[0249] Further, antibodies to the polypeptides of the invention can, in turn, be utilized to generate anti-idiotype antibodies that “mimic” polypeptides of the invention using techniques well known to those skilled in the art. (See, e.g., Greenspan & Bona, FASEB J. 7(5):437-444; (1989) and Nissinoff, J. Immunol. 147(8):2429-2438 (1991)). For example, antibodies which bind to and competitively inhibit polypeptide multimerization and/or binding of a polypeptide of the invention to a ligand can be used to generate anti-idiotypes that “mimic” the polypeptide multimerization and/or binding domain and, as a consequence, bind to and neutralize polypeptide and/or its ligand. Such neutralizing anti-idiotypes or Fab fragments of such anti-idiotypes can be used in therapeutic regimens to neutralize polypeptide ligand/receptor. For example, such anti-idiotypic antibodies can be used to bind a polypeptide of the invention and/or to bind its ligand(s)/receptor(s), and thereby block its biological activity. Alternatively, antibodies which bind to and enhance polypeptide multimerization and/or binding, and/or receptor/ligand multimerization, binding and/or signaling can be used to generate anti-idiotypes that function as agonists of a polypeptide of the invention and/or its ligand/receptor. Such agonistic anti-idiotypes or Fab fragments of such anti-idiotypes can be used in therapeutic regimens as agonists of the polypeptides of the invention or its ligand(s)/receptor(s). For example, such anti-idiotypic antibodies can be used to bind a polypeptide of the invention and/or to bind its ligand(s)/receptor(s), and thereby promote or enhance its biological activity.

[0250] Intrabodies of the invention can be produced using methods known in the art, such as those disclosed and reviewed in Chen et al., Hum. Gene Ther. 5:595-601 (1994); Marasco, W. A., Gene Ther. 4:11-15 (1997); Rondon and Marasco, Annu. Rev. Microbiol. 51:257-283 (1997); Proba et al., J. Mol. Biol. 275:245-253 (1998); Cohen et al., Oncogene 17:2445-2456 (1998); Ohage and Steipe, J. Mol. Biol. 291:1119-1128 (1999); Ohage et al., J. Mol. Biol. 291:1129-1134 (1999); Wirtz and Steipe, Protein Sci. 8:2245-2250 (1999); Zhu et al., J. Immunol. Methods 231:207-222 (1999); and references cited therein.

[0251] Polynucleotides Encoding Antibodies

[0252] The invention further provides polynucleotides comprising a nucleotide sequence encoding an antibody of the invention and fragments thereof. The invention also encompasses polynucleotides that hybridize under stringent or alternatively, under lower stringency hybridization conditions, e.g., as defined supra, to polynucleotides that encode an antibody, preferably, that specifically binds to a polypeptide of the invention, preferably, an antibody that binds to a polypeptide having the amino acid sequence of SEQ ID NO:Y, to a polypeptide encoded by a portion of SEQ ID NO:X as defined in columns 8 and 9 of Table 2, and/or to a polypeptide encoded by the cDNA contained in Clone ID NO:Z.

[0253] The polynucleotides may be obtained, and the nucleotide sequence of the polynucleotides determined, by any method known in the art. For example, if the nucleotide sequence of the antibody is known, a polynucleotide encoding the antibody may be assembled from chemically synthesized oligonucleotides (e.g., as described in Kutmeier et al., BioTechniques 17:242 (1994)), which, briefly, involves the synthesis of overlapping oligonucleotides containing portions of the sequence encoding the antibody, annealing and ligating of those oligonucleotides, and then amplification of the ligated oligonucleotides by PCR.

[0254] Alternatively, a polynucleotide encoding an antibody may be generated from nucleic acid from a suitable source. If a clone containing a nucleic acid encoding a particular antibody is not available, but the sequence of the antibody molecule is known, a nucleic acid encoding the immunoglobulin may be chemically synthesized or obtained from a suitable source (e.g., an antibody cDNA library, or a cDNA library generated from, or nucleic acid, preferably poly A+ RNA, isolated from, any tissue or cells expressing the antibody, such as hybridoma cells selected to express an antibody of the invention) by PCR amplification using synthetic primers hybridizable to the 3′ and 5′ ends of the sequence or by cloning using an oligonucleotide probe specific for the particular gene sequence to identify, e.g., a cDNA clone from a cDNA library that encodes the antibody. Amplified nucleic acids generated by PCR may then be cloned into replicable cloning vectors using any method well known in the art.

[0255] Once the nucleotide sequence and corresponding amino acid sequence of the antibody is determined, the nucleotide sequence of the antibody may be manipulated using methods well known in the art for the manipulation of nucleotide sequences, e.g., recombinant DNA techniques, site directed mutagenesis, PCR, etc. (see, for example, the techniques described in Sambrook et al., 1990, Molecular Cloning, A Laboratory Manual, 2d Ed., Cold Spring Harbor Laboratory, Cold Spring Harbor, N.Y. and Ausubel et al., eds., 1998, Current Protocols in Molecular Biology, John Wiley & Sons, NY, which are both incorporated by reference herein in their entireties), to generate antibodies having a different amino acid sequence, for example to create amino acid substitutions, deletions, and/or insertions.

[0256] In a specific embodiment, the amino acid sequence of the heavy and/or light chain variable domains may be inspected to identify the sequences of the complementarity determining regions (CDRs) by methods that are well know in the art, e.g., by comparison to known amino acid sequences of other heavy and light chain variable regions to determine the regions of sequence hypervariability. Using routine recombinant DNA techniques, one or more of the CDRs may be inserted within framework regions, e.g., into human framework regions to humanize a non-human antibody, as described supra. The framework regions may be naturally occurring or consensus framework regions, and preferably human framework regions (see, e.g., Chothia et al., J. Mol. Biol. 278: 457-479 (1998) for a listing of human framework regions). Preferably, the polynucleotide generated by the combination of the framework regions and CDRs encodes an antibody that specifically binds a polypeptide of the invention. Preferably, as discussed supra, one or more amino acid substitutions may be made within the framework regions, and, preferably, the amino acid substitutions improve binding of the antibody to its antigen. Additionally, such methods may be used to make amino acid substitutions or deletions of one or more variable region cysteine residues participating in an intrachain disulfide bond to generate antibody molecules lacking one or more intrachain disulfide bonds. Other alterations to the polynucleotide are encompassed by the present invention and within the skill of the art.

[0257] In addition, techniques developed for the production of “chimeric antibodies” (Morrison et al., Proc. Natl. Acad. Sci. 81:851-855 (1984); Neuberger et al., Nature 312:604-608 (1984); Takeda et al., Nature 314:452-454 (1985)) by splicing genes from a mouse antibody molecule of appropriate antigen specificity together with genes from a human antibody molecule of appropriate biological activity can be used. As described supra, a chimeric antibody is a molecule in which different portions are derived from different animal species, such as those having a variable region derived from a murine mAb and a human immunoglobulin constant region, e.g., humanized antibodies.

[0258] Alternatively, techniques described for the production of single chain antibodies (U.S. Pat. No. 4,946,778; Bird, Science 242:423-42 (1988); Huston et al., Proc. Natl. Acad. Sci. USA 85:5879-5883 (1988); and Ward et al., Nature 334:544-54 (1989)) can be adapted to produce single chain antibodies. Single chain antibodies are formed by linking the heavy and light chain fragments of the Fv region via an amino acid bridge, resulting in a single chain polypeptide. Techniques for the assembly of functional Fv fragments in E. coli may also be used (Skerra et al., Science 242:1038-1041 (1988)).

[0259] Methods of Producing Antibodies

[0260] The antibodies of the invention can be produced by any method known in the art for the synthesis of antibodies, in particular, by chemical synthesis or preferably, by recombinant expression techniques. Methods of producing antibodies include, but are not limited to, hybridoma technology, EBV transformation, and other methods discussed herein as well as through the use recombinant DNA technology, as discussed below.

[0261] Recombinant expression of an antibody of the invention, or fragment, derivative or analog thereof, (e.g., a heavy or light chain of an antibody of the invention or a single chain antibody of the invention), requires construction of an expression vector containing a polynucleotide that encodes the antibody. Once a polynucleotide encoding an antibody molecule or a heavy or light chain of an antibody, or portion thereof (preferably containing the heavy or light chain variable domain), of the invention has been obtained, the vector for the production of the antibody molecule may be produced by recombinant DNA technology using techniques well known in the art. Thus, methods for preparing a protein by expressing a polynucleotide containing an antibody encoding nucleotide sequence are described herein. Methods which are well known to those skilled in the art can be used to construct expression vectors containing antibody coding sequences and appropriate transcriptional and translational control signals. These methods include, for example, in vitro recombinant DNA techniques, synthetic techniques, and in vivo genetic recombination. The invention, thus, provides replicable vectors comprising a nucleotide sequence encoding an antibody molecule of the invention, or a heavy or light chain thereof, or a heavy or light chain variable domain, operably linked to a promoter. Such vectors may include the nucleotide sequence encoding the constant region of the antibody molecule (see, e.g., PCT Publication WO 86/05807; PCT Publication WO 89/01036; and U.S. Pat. No. 5,122,464) and the variable domain of the antibody may be cloned into such a vector for expression of the entire heavy or light chain.

[0262] The expression vector is transferred to a host cell by conventional techniques and the transfected cells are then cultured by conventional techniques to produce an antibody of the invention. Thus, the invention includes host cells containing a polynucleotide encoding an antibody of the invention, or a heavy or light chain thereof, or a single chain antibody of the invention, operably linked to a heterologous promoter. In preferred embodiments for the expression of double-chained antibodies, vectors encoding both the heavy and light chains may be co-expressed in the host cell for expression of the entire immunoglobulin molecule, as detailed below.

[0263] A variety of host-expression vector systems may be utilized to express the antibody molecules of the invention. Such host-expression systems represent vehicles by which the coding sequences of interest may be produced and subsequently purified, but also represent cells which may, when transformed or transfected with the appropriate nucleotide coding sequences, express an antibody molecule of the invention in situ. These include but are not limited to microorganisms such as bacteria (e.g., E. coli, B. subtilis) transformed with recombinant bacteriophage DNA, plasmid DNA or cosmid DNA expression vectors containing antibody coding sequences; yeast (e.g., Saccharomyces, Pichia) transformed with recombinant yeast expression vectors containing antibody coding sequences; insect cell systems infected with recombinant virus expression vectors (e.g., baculovirus) containing antibody coding sequences; plant cell systems infected with recombinant virus expression vectors (e.g., cauliflower mosaic virus, CaMV; tobacco mosaic virus, TMV) or transformed with recombinant plasmid expression vectors (e.g., Ti plasmid) containing antibody coding sequences; or mammalian cell systems (e.g., COS, CHO, BHK, 293, 3T3 cells) harboring recombinant expression constructs containing promoters derived from the genome of mammalian cells (e.g., metallothionein promoter) or from mammalian viruses (e.g., the adenovirus late promoter; the vaccinia virus 7.5K promoter). Preferably, bacterial cells such as Escherichia coli, and more preferably, eukaryotic cells, especially for the expression of whole recombinant antibody molecule, are used for the expression of a recombinant antibody molecule. For example, mammalian cells such as Chinese hamster ovary cells (CHO), in conjunction with a vector such as the major intermediate early gene promoter element from human cytomegalovirus is an effective expression system for antibodies (Foecking et al., Gene 45:101 (1986); Cockett et al., Bio/Technology 8:2 (1990)).

[0264] In bacterial systems, a number of expression vectors may be advantageously selected depending upon the use intended for the antibody molecule being expressed. For example, when a large quantity of such a protein is to be produced, for the generation of pharmaceutical compositions of an antibody molecule, vectors which direct the expression of high levels of fusion protein products that are readily purified may be desirable. Such vectors include, but are not limited, to the E. coli expression vector pUR278 (Ruther et al., EMBO J. 2:1791 (1983)), in which the antibody coding sequence may be ligated individually into the vector in frame with the lac Z coding region so that a fusion protein is produced; pIN vectors (Inouye & Inouye, Nucleic Acids Res. 13:3101-3109 (1985); Van Heeke & Schuster, J. Biol. Chem. 24:5503-5509 (1989)); and the like. pGEX vectors may also be used to express foreign polypeptides as fusion proteins with glutathione S-transferase (GST). In general, such fusion proteins are soluble and can easily be purified from lysed cells by adsorption and binding to matrix glutathione-agarose beads followed by elution in the presence of free glutathione. The pGEX vectors are designed to include thrombin or factor Xa protease cleavage sites so that the cloned target gene product can be released from the GST moiety.

[0265] In an insect system, Autographa californica nuclear polyhedrosis virus (AcNPV) is used as a vector to express foreign genes. The virus grows in Spodoptera frugiperda cells. The antibody coding sequence may be cloned individually into non-essential regions (for example the polyhedrin gene) of the virus and placed under control of an AcNPV promoter (for example the polyhedrin promoter).

[0266] In mammalian host cells, a number of viral-based expression systems may be utilized. In cases where an adenovirus is used as an expression vector, the antibody coding sequence of interest may be ligated to an adenovirus transcription/translation control complex, e.g., the late promoter and tripartite leader sequence. This chimeric gene may then be inserted in the adenovirus genome by in vitro or in vivo recombination. Insertion in a non-essential region of the viral genome (e.g., region E1 or E3) will result in a recombinant virus that is viable and capable of expressing the antibody molecule in infected hosts. (e.g., see Logan & Shenk, Proc. Natl. Acad. Sci. USA 81:355-359 (1984)). Specific initiation signals may also be required for efficient translation of inserted antibody coding sequences. These signals include the ATG initiation codon and adjacent sequences. Furthermore, the initiation codon must be in phase with the reading frame of the desired coding sequence to ensure translation of the entire insert. These exogenous translational control signals and initiation codons can be of a variety of origins, both natural and synthetic. The efficiency of expression may be enhanced by the inclusion of appropriate transcription enhancer elements, transcription terminators, etc. (see Bittner et al., Methods in Enzymol. 153:51-544 (1987)).

[0267] In addition, a host cell strain may be chosen which modulates the expression of the inserted sequences, or modifies and processes the gene product in the specific fashion desired. Such modifications (e.g., glycosylation) and processing (e.g., cleavage) of protein products may be important for the function of the protein. Different host cells have characteristic and specific mechanisms for the post-translational processing and modification of proteins and gene products. Appropriate cell lines or host systems can be chosen to ensure the correct modification and processing of the foreign protein expressed. To this end, eukaryotic host cells which possess the cellular machinery for proper processing of the primary transcript, glycosylation, and phosphorylation of the gene product may be used. Such mammalian host cells include but are not limited to CHO, VERY, BHK, Hela, COS, MDCK, 293, 3T3, W138, and in particular, breast cancer cell lines such as, for example, BT483, Hs578T, HTB2, BT20 and T47D, and normal mammary gland cell line such as, for example, CRL7030 and Hs578Bst.

[0268] For long-term, high-yield production of recombinant proteins, stable expression is preferred. For example, cell lines, which stably express the antibody molecule may be engineered. Rather than using expression vectors which contain viral origins of replication, host cells can be transformed with DNA controlled by appropriate expression control elements (e.g., promoter, enhancer, sequences, transcription terminators, polyadenylation sites, etc.), and a selectable marker. Following the introduction of the foreign DNA, engineered cells may be allowed to grow for 1-2 days in an enriched media, and then are switched to a selective media. The selectable marker in the recombinant plasmid confers resistance to the selection and allows cells to stably integrate the plasmid into their chromosomes and grow to form foci which in turn can be cloned and expanded into cell lines. This method may advantageously be used to engineer cell lines, which express the antibody molecule. Such engineered cell lines may be particularly useful in screening and evaluation of compounds that interact directly or indirectly with the antibody molecule.

[0269] A number of selection systems may be used, including but not limited to the herpes simplex virus thymidine kinase (Wigler et al., Cell 11:223 (1977)), hypoxanthine-guanine phosphoribosyltransferase (Szybalska & Szybalski, Proc. Natl. Acad. Sci. USA 48:202 (1992)), and adenine phosphoribosyltransferase (Lowy et al., Cell 22:817 (1980)) genes can be employed in tk-, hgprt- or aprt-cells, respectively. Also, antimetabolite resistance can be used as the basis of selection for the following genes: dhfr, which confers resistance to methotrexate (Wigler et al., Natl. Acad. Sci. USA 77:357 (1980); O'Hare et al., Proc. Natl. Acad. Sci. USA 78:1527 (1981)); gpt, which confers resistance to mycophenolic acid (Mulligan & Berg, Proc. Natl. Acad. Sci. USA 78:2072 (1981)); neo, which confers resistance to the aminoglycoside G-418 Clinical Pharmacy 12:488-505; Wu and Wu, Biotherapy 3:87-95 (1991); Tolstoshev, Ann. Rev. Pharmacol. Toxicol. 32:573-596 (1993); Mulligan, Science 260:926-932 (1993); and Morgan and Anderson, Ann. Rev. Biochem. 62:191-217 (1993); T1B TECH 11(5):155-215 (1993)); and hygro, which confers resistance to hygromycin (Santerre et al., Gene 30:147 (1984)). Methods commonly known in the art of recombinant DNA technology may be routinely applied to select the desired recombinant clone, and such methods are described, for example, in Ausubel et al. (eds.), Current Protocols in Molecular Biology, John Wiley & Sons, NY (1993); Kriegler, Gene Transfer and Expression, A Laboratory Manual, Stockton Press, NY (1990); and in Chapters 12 and 13, Dracopoli et al. (eds), Current Protocols in Human Genetics, John Wiley & Sons, NY (1994); Colberre-Garapin et al., J. Mol. Biol. 150:1 (1981), which are incorporated by reference herein in their entireties.

[0270] The expression levels of an antibody molecule can be increased by vector amplification (for a review, see Bebbington and Hentschel, The use of vectors based on gene amplification for the expression of cloned genes in mammalian cells in DNA cloning, Vol.3. (Academic Press, New York, 1987)). When a marker in the vector system expressing antibody is amplifiable, increase in the level of inhibitor present in culture of host cell will increase the number of copies of the marker gene. Since the amplified region is associated with the antibody gene, production of the antibody will also increase (Crouse et al., Mol. Cell. Biol. 3:257 (1983)).

[0271] Vectors, which use glutamine synthase (GS) or DHFR as the selectable markers can be amplified in the presence of the drugs methionine sulphoximine or methotrexate, respectively. An advantage of glutamine synthase based vectors are the availability of cell lines (e.g., the murine myeloma cell line, NSO) which are glutamine synthase negative. Glutamine synthase expression systems can also function in glutamine synthase expressing cells (e.g., Chinese Hamster Ovary (CHO) cells) by providing additional inhibitor to prevent the functioning of the endogenous gene. A glutamine synthase expression system and components thereof are detailed in PCT publications: WO87/04462; WO86/05807; WO89/01036; WO89/10404; and WO91/06657, which are incorporated in their entireties by reference herein. Additionally, glutamine synthase expression vectors that may be used according to the present invention are commercially available from suppliers, including, for example Lonza Biologics, Inc. (Portsmouth, N.H.). Expression and production of monoclonal antibodies using a GS expression system in murine myeloma cells is described in Bebbington et al., Bio/technology 10:169(1992) and in Biblia and Robinson Biotechnol. Prog. 11:1 (1995) which are incorporated in their entireties by reference herein.

[0272] The host cell may be co-transfected with two expression vectors of the invention, the first vector encoding a heavy chain derived polypeptide and the second vector encoding a light chain derived polypeptide. The two vectors may contain identical selectable markers, which enable equal expression of heavy and light chain polypeptides. Alternatively, a single vector may be used which encodes, and is capable of expressing, both heavy and light chain polypeptides. In such situations, the light chain should be placed before the heavy chain to avoid an excess of toxic free heavy chain (Proudfoot, Nature 322:52 (1986); Kohler, Proc. Natl. Acad. Sci. USA 77:2197 (1980)). The coding sequences for the heavy and light chains may comprise cDNA or genomic DNA.

[0273] Once an antibody molecule of the invention has been produced by an animal, chemically synthesized, or recombinantly expressed, it may be purified by any method known in the art for purification of an immunoglobulin molecule, for example, by chromatography (e.g., ion exchange, affinity, particularly by affinity for the specific antigen after Protein A, and sizing column chromatography), centrifugation, differential solubility, or by any other standard technique for the purification of proteins. In addition, the antibodies of the present invention or fragments thereof can be fused to heterologous polypeptide sequences described herein or otherwise known in the art, to facilitate purification.

[0274] The present invention encompasses antibodies recombinantly fused or chemically conjugated (including both covalently and non-covalently conjugations) to a polypeptide (or portion thereof, preferably at least 10, 20, 30, 40, 50, 60, 70, 80, 90 or 100 amino acids of the polypeptide) of the present invention to generate fusion proteins. The fusion does not necessarily need to be direct, but may occur through linker sequences. The antibodies may be specific for antigens other than polypeptides (or portion thereof, preferably at least 10, 20, 30, 40, 50, 60, 70, 80, 90 or 100 amino acids of the polypeptide) of the present invention. For example, antibodies may be used to target the polypeptides of the present invention to particular cell types, either in vitro or in vivo, by fusing or conjugating the polypeptides of the present invention to antibodies specific for particular cell surface receptors. Antibodies fused or conjugated to the polypeptides of the present invention may also be used in in vitro immunoassays and purification methods using methods known in the art. See e.g., Harbor et al., supra, and PCT publication WO 93/21232; EP 439,095; Naramura et al., Immunol. Lett. 39:91-99 (1994); U.S. Pat. No. 5,474,981; Gillies et al., PNAS 89:1428-1432 (1992); Fell et al., J. Immunol. 146:2446-2452 (1991), which are incorporated by reference in their entireties.

[0275] The present invention further includes compositions comprising the polypeptides of the present invention fused or conjugated to antibody domains other than the variable regions. For example, the polypeptides of the present invention may be fused or conjugated to an antibody Fc region, or portion thereof. The antibody portion fused to a polypeptide of the present invention may comprise the constant region, hinge region, CH1 domain, CH2 domain, and CH3 domain or any combination of whole domains or portions thereof. The polypeptides may also be fused or conjugated to the above antibody portions to form multimers. For example, Fc portions fused to the polypeptides of the present invention can form dimers through disulfide bonding between the Fc portions. Higher multimeric forms can be made by fusing the polypeptides to portions of IgA and IgM. Methods for fusing or conjugating the polypeptides of the present invention to antibody portions are known in the art. See, e.g., U.S. Pat. Nos. 5,336,603; 5,622,929; 5,359,046; 5,349,053; 5,447,851; 5,112,946; EP 307,434; EP 367,166; PCT publications WO 96/04388; WO 91/06570; Ashkenazi et al., Proc. Natl. Acad. Sci. USA 88:10535-10539 (1991); Zheng et al., J. Immunol. 154:5590-5600 (1995); and Vil et al., Proc. Natl. Acad. Sci. USA 89:11337-11341 (1992) (said references incorporated by reference in their entireties).

[0276] As discussed, supra, the polypeptides corresponding to a polypeptide, polypeptide fragment, or a variant of SEQ ID NO:Y may be fused or conjugated to the above antibody portions to increase the in vivo half life of the polypeptides or for use in immunoassays using methods known in the art. Further, the polypeptides corresponding to SEQ ID NO:Y may be fused or conjugated to the above antibody portions to facilitate purification. One reported example describes chimeric proteins consisting of the first two domains of the human CD4-polypeptide and various domains of the constant regions of the heavy or light chains of mammalian immunoglobulins. See EP 394,827; Traunecker et al., Nature 331:84-86 (1988). The polypeptides of the present invention fused or conjugated to an antibody having disulfide-linked dimeric structures (due to the IgG) may also be more efficient in binding and neutralizing other molecules, than the monomeric secreted protein or protein fragment alone. See, for example, Fountoulakis et al., J. Biochem. 270:3958-3964 (1995). In many cases, the Fc part in a fusion protein is beneficial in therapy and diagnosis, and thus can result in, for example, improved pharmacokinetic properties. See, for example, EP A 232,262. Alternatively, deleting the Fc part after the fusion protein has been expressed, detected, and purified, would be desired. For example, the Fc portion may hinder therapy and diagnosis if the fusion protein is used as an antigen for immunizations. In drug discovery, for example, human proteins, such as hIL-5, have been fused with Fc portions for the purpose of high-throughput screening assays to identify antagonists of hIL-5. (See, Bennett et al., J. Molecular Recognition 8:52-58 (1995); Johanson et al., J. Biol. Chem. 270:9459-9471 (1995)).

[0277] Moreover, the antibodies or fragments thereof of the present invention can be fused to marker sequences, such as a peptide to facilitate purification. In preferred embodiments, the marker amino acid sequence is a hexa-histidine peptide, such as the tag provided in a pQE vector (QIAGEN, Inc., 9259 Eton Avenue, Chatsworth, Calif., 91311), among others, many of which are commercially available. As described in Gentz et al., Proc. Natl. Acad. Sci. USA 86:821-824 (1989), for instance, hexa-histidine provides for convenient purification of the fusion protein. Other peptide tags useful for purification include, but are not limited to, the “HA” tag, which corresponds to an epitope derived from the influenza hemagglutinin protein (Wilson et al., Cell 37:767 (1984)) and the “flag” tag.

[0278] The present invention further encompasses antibodies or fragments thereof conjugated to a diagnostic or therapeutic agent. The antibodies can be used diagnostically to, for example, monitor the development or progression of a tumor as part of a clinical testing procedure to, e.g., determine the efficacy of a given treatment regimen. Detection can be facilitated by coupling the antibody to a detectable substance. Examples of detectable substances include various enzymes, prosthetic groups, fluorescent materials, luminescent materials, bioluminescent materials, radioactive materials, positron emitting metals using various positron emission tomographies, and nonradioactive paramagnetic metal ions. The detectable substance may be coupled or conjugated either directly to the antibody (or fragment thereof) or indirectly, through an intermediate (such as, for example, a linker known in the art) using techniques known in the art. See, for example, U.S. Pat. No. 4,741,900 for metal ions which can be conjugated to antibodies for use as diagnostics according to the present invention.

[0279] Further, an antibody or fragment thereof may be conjugated to a therapeutic moiety such as a cytotoxin, e.g., a cytostatic or cytocidal agent, a therapeutic agent or a radioactive metal ion, e.g., alpha-emitters such as, for example, 213Bi. A cytotoxin or cytotoxic agent includes any agent that is detrimental to cells. Examples include paclitaxol, cytochalasin B, gramicidin D, ethidium bromide, emetine, mitomycin, etoposide, tenoposide, vincristine, vinblastine, colchicin, doxorubicin, daunorubicin, dihydroxy anthracin dione, mitoxantrone, mithramycin, actinomycin D, 1-dehydrotestosterone, glucocorticoids, procaine, tetracaine, lidocaine, propranolol, and puromycin and analogs or homologs thereof. Therapeutic agents include, but are not limited to, antimetabolites (e.g., methotrexate, 6-mercaptopurine, 6-thioguanine, cytarabine, 5-fluorouracil decarbazine), alkylating agents (e.g., mechlorethamine, thioepa chlorambucil, melphalan, carmustine (BSNU) and lomustine (CCNU), cyclothosphamide, busulfan, dibromomannitol, streptozotocin, mitomycin C, and cis-dichlorodiamine platinum (II) (DDP) cisplatin), anthracyclines (e.g., daunorubicin (formerly daunomycin) and doxorubicin), antibiotics (e.g., dactinomycin (formerly actinomycin), bleomycin, mithramycin, and anthramycin (AMC)), and anti-mitotic agents (e.g., vincristine and vinblastine).

[0280] The conjugates of the invention can be used for modifying a given biological response, the therapeutic agent or drug moiety is not to be construed as limited to classical chemical therapeutic agents. For example, the drug moiety may be a protein or polypeptide possessing a desired biological activity. Such proteins may include, for example, a toxin such as abrin, ricin A, pseudomonas exotoxin, or diphtheria toxin; a protein such as tumor necrosis factor, a-interferon, β-interferon, nerve growth factor, platelet derived growth factor, tissue plasminogen activator, an apoptotic agent, e.g., TNF-alpha, TNF-beta, AIM I (See, International Publication No. WO 97/33899), AIM II (See, International Publication No. WO 97/34911), Fas Ligand (Takahashi et al., Int. Immunol., 6:1567-1574 (1994)), VEGI (See, International Publication No. WO 99/23105), a thrombotic agent or an anti-angiogenic agent, e.g., angiostatin or endostatin; or, biological response modifiers such as, for example, lymphokines, interleukin-1 (“IL-1”), interleukin-2 (“IL-2”), interleukin-6 (“IL-6”), granulocyte macrophage colony stimulating factor (“GM-CSF”), granulocyte colony stimulating factor (“G-CSF”), or other growth factors.

[0281] Antibodies may also be attached to solid supports, which are particularly useful for immunoassays or purification of the target antigen. Such solid supports include, but are not limited to, glass, cellulose, polyacrylamide, nylon, polystyrene, polyvinyl chloride or polypropylene.

[0282] Techniques for conjugating such therapeutic moiety to antibodies are well known. See, for example, Arnon et al., “Monoclonal Antibodies For Immunotargeting Of Drugs In Cancer Therapy”, in Monoclonal Antibodies And Cancer Therapy, Reisfeld et al. (eds.), pp. 243-56 (Alan R. Liss, Inc. 1985); Hellstrom et al., “Antibodies For Drug Delivery”, in Controlled Drug Delivery (2nd Ed.), Robinson et al. (eds.), pp. 623-53 (Marcel Dekker, Inc. 1987); Thorpe, “Antibody Carriers Of Cytotoxic Agents In Cancer Therapy: A Review”, in Monoclonal Antibodies '84: Biological And Clinical Applications, Pinchera et al. (eds.), pp. 475-506 (1985); “Analysis, Results, And Future Prospective Of The Therapeutic Use Of Radiolabeled Antibody In Cancer Therapy”, in Monoclonal Antibodies For Cancer Detection And Therapy, Baldwin et al. (eds.), pp. 303-16 (Academic Press 1985), and Thorpe et al., “The Preparation And Cytotoxic Properties Of Antibody-Toxin Conjugates”, Immunol. Rev. 62:119-58 (1982).

[0283] Alternatively, an antibody can be conjugated to a second antibody to form an antibody heteroconjugate as described by Segal in U.S. Pat. No. 4,676,980, which is incorporated herein by reference in its entirety.

[0284] An antibody, with or without a therapeutic moiety conjugated to it, administered alone or in combination with cytotoxic factor(s) and/or cytokine(s) can be used as a therapeutic.

[0285] Immunophenotyping

[0286] The antibodies of the invention may be utilized for immunophenotyping of cell lines and biological samples. Translation products of the genes of the present invention may be useful as cell specific markers, or more specifically as cellular markers that are differentially expressed at various stages of differentiation and/or maturation of particular cell types. Monoclonal antibodies directed against a specific epitope, or combination of epitopes, will allow for the screening of cellular populations expressing the marker. Various techniques can be utilized using monoclonal antibodies to screen for cellular populations expressing the marker(s), and include magnetic separation using antibody-coated magnetic beads, “panning” with antibody attached to a solid matrix (i.e., plate), and flow cytometry (See, e.g., U.S. Pat. No. 5,985,660; and Morrison et al., Cell, 96:737-49 (1999)).

[0287] These techniques allow for the screening of particular populations of cells, such as might be found with hematological malignancies (i.e. minimal residual disease (MRD) in acute leukemic patients) and ‘non-self’ cells in transplantations to prevent Graft-versus-Host Disease (GVHD). Alternatively, these techniques allow for the screening of hematopoietic stem and progenitor cells capable of undergoing proliferation and/or differentiation, as might be found in human umbilical cord blood.

[0288] Assays For Antibody Binding

[0289] The antibodies of the invention may be assayed for immunospecific binding by any method known in the art. The immunoassays which can be used include but are not limited to competitive and non-competitive assay systems using techniques such as western blots, radioimmunoassays, ELISA (enzyme linked immunosorbent assay), “sandwich” immunoassays, immunoprecipitation assays, precipitin reactions, gel diffusion precipitin reactions, immunodiffusion assays, agglutination assays, complement-fixation assays, immunoradiometric assays, fluorescent immunoassays, and protein A immunoassays, to name but a few. Such assays are routine and well known in the art (see, e.g., Ausubel et al, eds, 1994, Current Protocols in Molecular Biology, Vol. 1, John Wiley & Sons, Inc., New York, which is incorporated by reference herein in its entirety). Exemplary immunoassays are described briefly below (but are not intended by way of limitation).

[0290] Immunoprecipitation protocols generally comprise lysing a population of cells in a lysis buffer such as RIPA buffer (1% NP-40 or Triton X-100, 1% sodium deoxycholate, 0.1% SDS, 0.15 M NaCl, 0.01 M sodium phosphate at pH 7.2, 1% Trasylol) supplemented with protein phosphatase and/or protease inhibitors (e.g., EDTA, PMSF, aprotinin, sodium vanadate), adding the antibody of interest to the cell lysate, incubating for a period of time (e.g., 1-4 hours) at 4° C., adding protein A and/or protein G sepharose beads to the cell lysate, incubating for about an hour or more at 4° C., washing the beads in lysis buffer and resuspending the beads in SDS/sample buffer. The ability of the antibody of interest to immunoprecipitate a particular antigen can be assessed by, e.g., western blot analysis. One of skill in the art would be knowledgeable as to the parameters that can be modified to increase the binding of the antibody to an antigen and decrease the background (e.g., pre-clearing the cell lysate with sepharose beads). For further discussion regarding immunoprecipitation protocols see, e.g., Ausubel et al., eds., (1994), Current Protocols in Molecular Biology, Vol. 1, John Wiley & Sons, Inc., New York, section 10.16.1.

[0291] Western blot analysis generally comprises preparing protein samples, electrophoresis of the protein samples in a polyacrylamide gel (e.g., 8%-20% SDS-PAGE depending on the molecular weight of the antigen), transferring the protein sample from the polyacrylamide gel to a membrane such as nitrocellulose, PVDF or nylon, blocking the membrane in blocking solution (e.g., PBS with 3% BSA or non-fat milk), washing the membrane in washing buffer (e.g., PBS-Tween 20), blocking the membrane with primary antibody (the antibody of interest) diluted in blocking buffer, washing the membrane in washing buffer, blocking the membrane with a secondary antibody (which recognizes the primary antibody, e.g., an anti-human antibody) conjugated to an enzymatic substrate (e.g., horseradish peroxidase or alkaline phosphatase) or radioactive molecule (e.g., 32P or 125I) diluted in blocking buffer, washing the membrane in wash buffer, and detecting the presence of the antigen. One of skill in the art would be knowledgeable as to the parameters that can be modified to increase the signal detected and to reduce the background noise. For further discussion regarding western blot protocols see, e.g., Ausubel et al., eds., (1994), Current Protocols in Molecular Biology, Vol. 1, John Wiley & Sons, Inc., New York, section 10.8.1.

[0292] ELISAs comprise preparing antigen, coating the well of a 96 well microtiter plate with the antigen, adding the antibody of interest conjugated to a detectable compound such as an enzymatic substrate (e.g., horseradish peroxidase or alkaline phosphatase) to the well and incubating for a period of time, and detecting the presence of the antigen. In ELISAs the antibody of interest does not have to be conjugated to a detectable compound; instead, a second antibody (which recognizes the antibody of interest) conjugated to a detectable compound may be added to the well. Further, instead of coating the well with the antigen, the antibody may be coated to the well. In this case, a second antibody conjugated to a detectable compound may be added following the addition of the antigen of interest to the coated well. One of skill in the art would be knowledgeable as to the parameters that can be modified to increase the signal detected as well as other variations of ELISAs known in the art. For further discussion regarding ELISAs see, e.g., Ausubel et al., eds, (1994), Current Protocols in Molecular Biology, Vol. 1, John Wiley & Sons, Inc., New York, section 11.2.1.

[0293] The binding affinity of an antibody to an antigen and the off-rate of an antibody-antigen interaction can be determined by competitive binding assays. One example of a competitive binding assay is a radioimmunoassay comprising the incubation of labeled antigen (e.g., 3H or 125I) with the antibody of interest in the presence of increasing amounts of unlabeled antigen, and the detection of the antibody bound to the labeled antigen. The affinity of the antibody of interest for a particular antigen and the binding off-rates can be determined from the data by scatchard plot analysis. Competition with a second antibody can also be determined using radioimmunoassays. In this case, the antigen is incubated with antibody of interest conjugated to a labeled compound (e.g., 3H or 125I) in the presence of increasing amounts of an unlabeled second antibody.

[0294] Antibodies of the invention may be characterized using immunocytochemisty methods on cells (e.g., mammalian cells, such as CHO cells) transfected with a vector enabling the expression of a lung antigen or with vector alone using techniques commonly known in the art. Antibodies that bind lung antigen transfected cells, but not vector-only transfected cells, are lung antigen specific.

[0295] Therapeutic Uses

[0296] The present invention is further directed to antibody-based therapies which involve administering antibodies of the invention to an animal, preferably a mammal, and most preferably a human, patient for treating one or more of the disclosed diseases, disorders, or conditions. Therapeutic compounds of the invention include, but are not limited to, antibodies of the invention (including fragments, analogs and derivatives thereof as described herein) and nucleic acids encoding antibodies of the invention (including fragments, analogs and derivatives thereof and anti-idiotypic antibodies as described herein). The antibodies of the invention can be used to treat, inhibit or prevent diseases, disorders or conditions associated with aberrant expression and/or activity of a polypeptide of the invention, including, but not limited to, any one or more of the diseases, disorders, or conditions described herein. The treatment and/or prevention of diseases, disorders, or conditions associated with aberrant expression and/or activity of a polypeptide of the invention includes, but is not limited to, alleviating symptoms associated with those diseases, disorders or conditions. Antibodies of the invention may be provided in pharmaceutically acceptable compositions as known in the art or as described herein.

[0297] In a specific and preferred embodiment, the present invention is directed to antibody-based therapies which involve administering antibodies of the invention to an animal, preferably a mammal, and most preferably a human, patient for treating one or more of the diseases, disorders, or conditions of the lung, including, but not limited to allergic disorders (eosinophilic pneumonia, hypersensitivity pneumonitis (e.g., extrinsic allergic alveolitis, allergic interstitial pneumonitis, organic dust pneumoconiosis), asthma), pneumonia (e.g., bacterial, viral , fungal, atypical, and opportunistic infection), pleural disorders (e.g., pleurisy, pleural effusion, and pneumothorax), obstructive airway diseases (e.g., asthma, chronic obstructive pulmonary disease (COPD), emphysema, chronic or acute bronchitis), occupational lung diseases (e.g., silicosis, black lung, occupational asthsma, byssinosis, and benign pneumoconioses), Infiltrative Lung Disease (e.g., pulmonary fibrosis, idiopathic pulmonary fibrosis, and desquamative interstitial pneumonia), histiocytosis X, sarcoidosis and pulmonary alveolar proteinosis), Acute respiratory distress syndrome (also called, e.g., adult respiratory distress syndrome), edema, pulmonary embolism, bronchitis (e.g., viral, bacterial), bronchiectasis, atelectasis, lung abscess, cystic fibrosis, neoplasms and/or cancers of the lung, including, but not limited to, squamous cell carcinoma, small cell (oat cell) carcinoma, large cell carcinoma, and adenocarcinoma, and/or those disorders associated with the lung as described under “Respiratory Disorders” below. Therapeutic compounds of the invention include, but are not limited to, antibodies of the invention (e.g., antibodies directed to the full length protein expressed on the cell surface of a mammalian cell; antibodies directed to an epitope of a lung associated polypeptide of the invention (such as, a linear epitope (shown in Table 1A, column 6) or a conformational epitope), including fragments, analogs and derivatives thereof as described herein) and nucleic acids encoding antibodies of the invention (including fragments, analogs and derivatives thereof and anti-idiotypic antibodies as described herein). The antibodies of the invention can be used to treat, inhibit or prevent diseases, disorders or conditions associated with aberrant expression and/or activity of a polypeptide of the invention, including, but not limited to, any one or more of the diseases, disorders, or conditions of the lung described herein. The treatment and/or prevention of diseases, disorders, or conditions of the lung associated with aberrant expression and/or activity of a polypeptide of the invention includes, but is not limited to, alleviating symptoms associated with those diseases, disorders or conditions. Antibodies of the invention may be provided in pharmaceutically acceptable compositions as known in the art or as described herein.

[0298] A summary of the ways in which the antibodies of the present invention may be used therapeutically includes binding polynucleotides or polypeptides of the present invention locally or systemically in the body or by direct cytotoxicity of the antibody, e.g. as mediated by complement (CDC) or by effector cells (ADCC). Some of these approaches are described in more detail below. Armed with the teachings provided herein, one of ordinary skill in the art will know how to use the antibodies of the present invention for diagnostic, monitoring or therapeutic purposes without undue experimentation.

[0299] The antibodies of this invention may be advantageously utilized in combination with other monoclonal or chimeric antibodies, or with lymphokines or hematopoietic growth factors (such as, e.g., IL-2, IL-3 and IL-7), for example, which serve to increase the number or activity of effector cells which interact with the antibodies.

[0300] The antibodies of the invention may be administered alone or in combination with other types of treatments (e.g., radiation therapy, chemotherapy, hormonal therapy, immunotherapy and anti-tumor agents). Generally, administration of products of a species origin or species reactivity (in the case of antibodies) that is the same species as that of the patient is preferred. Thus, in a preferred embodiment, human antibodies, fragments derivatives, analogs, or nucleic acids, are administered to a human patient for therapy or prophylaxis.

[0301] It is preferred to use high affinity and/or potent in vivo inhibiting and/or neutralizing antibodies against polypeptides or polynucleotides of the present invention, fragments or regions thereof, for both immunoassays directed to and therapy of disorders related to polynucleotides or polypeptides, including fragments thereof, of the present invention. Such antibodies, fragments, or regions, will preferably have an affinity for polynucleotides or polypeptides of the invention, including fragments thereof. Preferred binding affinities include those with a dissociation constant or Kd less than 5×10⁻² M, 10⁻² M, 5×10⁻³ M, 10⁻³ M, 5×10⁻⁴ M, 10⁻⁴ M, 5×10⁻⁵ M, 10⁻⁵ M, 5×10⁻⁶ M, 10⁻⁶ M, 5×10⁻⁷ M, 10⁻⁷ M, 5×10⁻⁸ M, 10⁻⁸ M, 5×10⁻⁹ M, 10⁻⁹ M, 5×10⁻¹⁰ M, 10⁻¹⁰ M, 5×10⁻¹¹ M, 10⁻¹¹ M, 5×10⁻¹² M, 10⁻¹² M, 5×10⁻¹³ M, 10⁻¹³ M, 5×10⁻¹⁴ M, 10⁻¹⁴ M, 5×10⁻¹⁵ M, and 10⁻¹⁵ M.

[0302] Gene Therapy

[0303] In a specific embodiment, nucleic acids comprising sequences encoding antibodies or functional derivatives thereof, are administered to treat, inhibit or prevent a disease or disorder associated with aberrant expression and/or activity of a polypeptide of the invention, by way of gene therapy. Gene therapy refers to therapy performed by the administration to a subject of an expressed or expressible nucleic acid. In this embodiment of the invention, the nucleic acids produce their encoded protein that mediates a therapeutic effect.

[0304] Any of the methods for gene therapy available in the art can be used according to the present invention. Exemplary methods are described below.

[0305] For general reviews of the methods of gene therapy, see Goldspiel et al., Clinical Pharmacy 12:488-505 (1993); Wu and Wu, Biotherapy 3:87-95 (1991); Tolstoshev, Ann. Rev. Pharmacol. Toxicol. 32:573-596 (1993); Mulligan, Science 260:926-932 (1993); and Morgan and Anderson, Ann. Rev. Biochem. 62:191-217 (1993); May, TIBTECH 11(5):155-215 (1993). Methods commonly known in the art of recombinant DNA technology which can be used are described in Ausubel et al. (eds.), Current Protocols in Molecular Biology, John Wiley & Sons, NY (1993); and Kriegler, Gene Transfer and Expression, A Laboratory Manual, Stockton Press, NY (1990).

[0306] In a preferred embodiment, the compound comprises nucleic acid sequences encoding an antibody, said nucleic acid sequences being part of expression vectors that express the antibody or fragments or chimeric proteins or heavy or light chains thereof in a suitable host. In particular, such nucleic acid sequences have promoters operably linked to the antibody coding region, said promoter being inducible or constitutive, and, optionally, tissue-specific. In another particular embodiment, nucleic acid molecules are used in which the antibody coding sequences and any other desired sequences are flanked by regions that promote homologous recombination at a desired site in the genome, thus providing for intrachromosomal expression of the antibody encoding nucleic acids (Koller and Smithies, Proc. Natl. Acad. Sci. USA 86:8932-8935 (1989); Zijlstra et al., Nature 342:435-438 (1989). In specific embodiments, the expressed antibody molecule is a single chain antibody; alternatively, the nucleic acid sequences include sequences encoding both the heavy and light chains, or fragments thereof, of the antibody.

[0307] Delivery of the nucleic acids into a patient may be either direct, in which case the patient is directly exposed to the nucleic acid or nucleic acid-carrying vectors, or indirect, in which case, cells are first transformed with the nucleic acids in vitro, then transplanted into the patient. These two approaches are known, respectively, as in vivo or ex vivo gene therapy.

[0308] In a specific embodiment, the nucleic acid sequences are directly administered in vivo, where it is expressed to produce the encoded product. This can be accomplished by any of numerous methods known in the art, e.g., by constructing them as part of an appropriate nucleic acid expression vector and administering it so that they become intracellular, e.g., by infection using defective or attenuated retrovirals or other viral vectors (see U.S. Pat. No. 4,980,286), or by direct injection of naked DNA, or by use of microparticle bombardment (e.g., a gene gun; Biolistic, Dupont), or coating with lipids or cell-surface receptors or transfecting agents, encapsulation in liposomes, microparticles, or microcapsules, or by administering them in linkage to a peptide which is known to enter the nucleus, by administering it in linkage to a ligand subject to receptor-mediated endocytosis (see, e.g., Wu and Wu, J. Biol. Chem. 262:4429-4432 (1987)) (which can be used to target cell types specifically expressing the receptors), etc. In another embodiment, nucleic acid-ligand complexes can be formed in which the ligand comprises a fusogenic viral peptide to disrupt endosomes, allowing the nucleic acid to avoid lysosomal degradation. In yet another embodiment, the nucleic acid can be targeted in vivo for cell specific uptake and expression, by targeting a specific receptor (see, e.g., PCT Publications WO 92/06180; WO 92/22635; WO92/20316; WO93/14188, WO 93/20221). Alternatively, the nucleic acid can be introduced intracellularly and incorporated within host cell DNA for expression, by homologous recombination (Koller and Smithies, Proc. Natl. Acad. Sci. USA 86:8932-8935 (1989); Zijlstra et al., Nature 342:435-438 (1989)).

[0309] In a specific embodiment, viral vectors that contains nucleic acid sequences encoding an antibody of the invention are used. For example, a retroviral vector can be used (see Miller et al., Meth. Enzymol. 217:581-599 (1993)). These retroviral vectors contain the components necessary for the correct packaging of the viral genome and integration into the host cell DNA. The nucleic acid sequences encoding the antibody to be used in gene therapy are cloned into one or more vectors, which facilitates delivery of the gene into a patient. More detail about retroviral vectors can be found in Boesen et al., Biotherapy 6:291-302 (1994), which describes the use of a retroviral vector to deliver the mdrl gene to hematopoietic stem cells in order to make the stem cells more resistant to chemotherapy. Other references illustrating the use of retroviral vectors in gene therapy are: Clowes et al., J. Clin. Invest. 93:644-651 (1994); Kiem et al., Blood 83:1467-1473 (1994); Salmons and Gunzberg, Human Gene Therapy 4:129-141 (1993); and Grossman and Wilson, Curr. Opin. in Genetics and Devel. 3:110-114 (1993).

[0310] Adenoviruses are other viral vectors that can be used in gene therapy. Adenoviruses are especially attractive vehicles for delivering genes to respiratory epithelia. Adenoviruses naturally infect respiratory epithelia where they cause a mild disease. Other targets for adenovirus-based delivery systems are liver, the central nervous system, endothelial cells, and muscle. Adenoviruses have the advantage of being capable of infecting non-dividing cells. Kozarsky and Wilson, Current Opinion in Genetics and Development 3:499-503 (1993) present a review of adenovirus-based gene therapy. Bout et al., Human Gene Therapy 5:3-10 (1994) demonstrated the use of adenovirus vectors to transfer genes to the respiratory epithelia of rhesus monkeys. Other instances of the use of adenoviruses in gene therapy can be found in Rosenfeld et al., Science 252:431-434 (1991); Rosenfeld et al., Cell 68:143-155 (1992); Mastrangeli et al., J. Clin. Invest. 91:225-234 (1993); PCT Publication WO94/12649; and Wang, et al., Gene Therapy 2:775-783 (1995). In a preferred embodiment, adenovirus vectors are used.

[0311] Adeno-associated virus (AAV) has also been proposed for use in gene therapy (Walsh et al., Proc. Soc. Exp. Biol. Med. 204:289-300 (1993); U.S. Pat. No. 5,436,146).

[0312] Another approach to gene therapy involves transferring a gene to cells in tissue culture by such methods as electroporation, lipofection, calcium phosphate mediated transfection, or viral infection. Usually, the method of transfer includes the transfer of a selectable marker to the cells. The cells are then placed under selection to isolate those cells that have taken up and are expressing the transferred gene. Those cells are then delivered to a patient.

[0313] In this embodiment, the nucleic acid is introduced into a cell prior to administration in vivo of the resulting recombinant cell. Such introduction can be carried out by any method known in the art, including but not limited to transfection, electroporation, microinjection, infection with a viral or bacteriophage vector containing the nucleic acid sequences, cell fusion, chromosome-mediated gene transfer, microcell-mediated gene transfer, spheroplast fusion, etc. Numerous techniques are known in the art for the introduction of foreign genes into cells (see, e.g., Loeffler and Behr, Meth. Enzymol. 217:599-618 (1993); Cohen et al., Meth. Enzymol. 217:618-644 (1993); Cline, Pharmac. Ther. 29:69-92m (1985) and may be used in accordance with the present invention, provided that the necessary developmental and physiological functions of the recipient cells are not disrupted. The technique should provide for the stable transfer of the nucleic acid to the cell, so that the nucleic acid is expressible by the cell and preferably heritable and expressible by its cell progeny.

[0314] The resulting recombinant cells can be delivered to a patient by various methods known in the art. Recombinant blood cells (e.g., hematopoietic stem or progenitor cells) are preferably administered intravenously. The amount of cells envisioned for use depends on the desired effect, patient state, etc., and can be determined by one skilled in the art.

[0315] Cells into which a nucleic acid can be introduced for purposes of gene therapy encompass any desired, available cell type, and include but are not limited to epithelial cells, endothelial cells, keratinocytes, fibroblasts, muscle cells, hepatocytes; blood cells such as T lymphocytes, B lymphocytes, monocytes, macrophages, neutrophils, eosinophils, megakaryocytes, granulocytes; various stem or progenitor cells, in particular hematopoietic stem or progenitor cells, e.g., as obtained from bone marrow, umbilical cord blood, peripheral blood, fetal liver, etc.

[0316] In a preferred embodiment, the cell used for gene therapy is autologous to the patient.

[0317] In an embodiment in which recombinant cells are used in gene therapy, nucleic acid sequences encoding an antibody are introduced into the cells such that they are expressible by the cells or their progeny, and the recombinant cells are then administered in vivo for therapeutic effect. In a specific embodiment, stem or progenitor cells are used. Any stem and/or progenitor cells which can be isolated and maintained in vitro can potentially be used in accordance with this embodiment of the present invention (see e.g. PCT Publication WO 94/08598; Stemple and Anderson, Cell 71:973-985 (1992); Rheinwald, Meth. Cell Bio. 21A:229 (1980); and Pittelkow and Scott, Mayo Clinic Proc. 61:771 (1986)).

[0318] In a specific embodiment, the nucleic acid to be introduced for purposes of gene therapy comprises an inducible promoter operably linked to the coding region, such that expression of the nucleic acid is controllable by the presence or absence of an appropriate inducer of transcription.

[0319] Demonstration of Therapeutic or Prophylactic Activity

[0320] The compounds or pharmaceutical compositions of the invention are preferably tested in vitro, and then in vivo for the desired therapeutic or prophylactic activity, prior to use in humans. For example, in vitro assays to demonstrate the therapeutic or prophylactic utility of a compound or pharmaceutical composition include, the effect of a compound on a cell line or a patient tissue sample. The effect of the compound or composition on the cell line and/or tissue sample can be determined utilizing techniques known to those of skill in the art including, but not limited to, rosette formation assays and cell lysis assays. In accordance with the invention, in vitro assays which can be used to determine whether administration of a specific compound is indicated, include in vitro cell culture assays in which a patient tissue sample is grown in culture, and exposed to or otherwise administered a compound, and the effect of such compound upon the tissue sample is observed.

[0321] Therapeutic/Prophylactic Administration and Composition

[0322] The invention provides methods of treatment, inhibition and prophylaxis by administration to a subject of an effective amount of a compound or pharmaceutical composition of the invention, preferably a polypeptide or antibody of the invention. In a preferred embodiment, the compound is substantially purified (e.g., substantially free from substances that limit its effect or produce undesired side-effects). The subject is preferably an animal, including but not limited to animals such as cows, pigs, horses, chickens, cats, dogs, etc., and is preferably a mammal, and most preferably human.

[0323] Formulations and methods of administration that can be employed when the compound comprises a nucleic acid or an immunoglobulin are described above; additional appropriate formulations and routes of administration can be selected from among those described herein below.

[0324] Various delivery systems are known and can be used to administer a compound of the invention, e.g., encapsulation in liposomes, microparticles, microcapsules, recombinant cells capable of expressing the compound, receptor-mediated endocytosis (see, e.g., Wu and Wu, J. Biol. Chem. 262:4429-4432 (1987)), construction of a nucleic acid as part of a retroviral or other vector, etc. Methods of introduction include but are not limited to intradermal, intramuscular, intraperitoneal, intravenous, subcutaneous, intranasal, epidural, and oral routes. The compounds or compositions may be administered by any convenient route, for example by infusion or bolus injection, by absorption through epithelial or mucocutaneous linings (e.g., oral mucosa, rectal and intestinal mucosa, etc.) and may be administered together with other biologically active agents. Administration can be systemic or local. In addition, it may be desirable to introduce the pharmaceutical compounds or compositions of the invention into the central nervous system by any suitable route, including intraventricular and intrathecal injection; intraventricular injection may be facilitated by an intraventricular catheter, for example, attached to a reservoir, such as an Ommaya reservoir. Pulmonary administration can also be employed, e.g., by use of an inhaler or nebulizer, and formulation with an aerosolizing agent.

[0325] In a specific embodiment, it may be desirable to administer the pharmaceutical compounds or compositions of the invention locally to the area in need of treatment; this may be achieved by, for example, and not by way of limitation, local infusion during surgery, topical application, e.g., in conjunction with a wound dressing after surgery, by injection, by means of a catheter, by means of a suppository, or by means of an implant, said implant being of a porous, non-porous, or gelatinous material, including membranes, such as sialastic membranes, or fibers. Preferably, when administering a protein, including an antibody, of the invention, care must be taken to use materials to which the protein does not absorb.

[0326] In another embodiment, the compound or composition can be delivered in a vesicle, in particular a liposome (see Langer, Science 249:1527-1533 (1990); Treat et al., in Liposomes in the Therapy of Infectious Disease and Cancer, Lopez-Berestein and Fidler (eds.), Liss, New York, pp. 353-365 (1989); Lopez-Berestein, ibid., pp. 317-327; see generally ibid.)

[0327] In yet another embodiment, the compound or composition can be delivered in a controlled release system. In one embodiment, a pump may be used (see Langer, supra; Sefton, CRC Crit. Ref. Biomed. Eng. 14:201 (1987); Buchwald et al., Surgery 88:507 (1980); Saudek et al., N. Engl. J. Med. 321:574 (1989)). In another embodiment, polymeric materials can be used (see Medical Applications of Controlled Release, Langer and Wise (eds.), CRC Pres., Boca Raton, Fla. (1974); Controlled Drug Bioavailability, Drug Product Design and Performance, Smolen and Ball (eds.), Wiley, New York (1984); Ranger and Peppas, J., Macromol. Sci. Rev. Macromol. Chem. 23:61 (1983); see also Levy et al., Science 228:190 (1985); During et al., Ann. Neurol. 25:351 (1989); Howard et al., J. Neurosurg. 71:105 (1989)). In yet another embodiment, a controlled release system can be placed in proximity of the therapeutic target, e.g., the brain, thus requiring only a fraction of the systemic dose (see, e.g., Goodson, in Medical Applications of Controlled Release, supra, vol. 2, pp. 115-138 (1984)).

[0328] Other controlled release systems are discussed in the review by Langer (Science 249:1527-1533 (1990)).

[0329] In a specific embodiment where the compound of the invention is a nucleic acid encoding a protein, the nucleic acid can be administered in vivo to promote expression of its encoded protein, by constructing it as part of an appropriate nucleic acid expression vector and administering it so that it becomes intracellular, e.g., by use of a retroviral vector (see U.S. Pat. No. 4,980,286), or by direct injection, or by use of microparticle bombardment (e.g., a gene gun; Biolistic, Dupont), or coating with lipids or cell-surface receptors or transfecting agents, or by administering it in linkage to a homeobox-like peptide which is known to enter the nucleus (see e.g., Joliot et al., Proc. Natl. Acad. Sci. USA 88:1864-1868 (1991)), etc. Alternatively, a nucleic acid can be introduced intracellularly and incorporated within host cell DNA for expression, by homologous recombination.

[0330] The present invention also provides pharmaceutical compositions. Such compositions comprise a therapeutically effective amount of a compound, and a pharmaceutically acceptable carrier. In a specific embodiment, the term “pharmaceutically acceptable” means approved by a regulatory agency of the Federal or a state government or listed in the U.S. Pharmacopeia or other generally recognized pharmacopeia for use in animals, and more particularly in humans. The term “carrier” refers to a diluent, adjuvant, excipient, or vehicle with which the therapeutic is administered. Such pharmaceutical carriers can be sterile liquids, such as water and oils, including those of petroleum, animal, vegetable or synthetic origin, such as peanut oil, soybean oil, mineral oil, sesame oil and the like. Water is a preferred carrier when the pharmaceutical composition is administered intravenously. Saline solutions and aqueous dextrose and glycerol solutions can also be employed as liquid carriers, particularly for injectable solutions. Suitable pharmaceutical excipients include starch, glucose, lactose, sucrose, gelatin, malt, rice, flour, chalk, silica gel, sodium stearate, glycerol monostearate, talc, sodium chloride, dried skim milk, glycerol, propylene, glycol, water, ethanol and the like. The composition, if desired, can also contain minor amounts of wetting or emulsifying agents, or pH buffering agents. These compositions can take the form of solutions, suspensions, emulsion, tablets, pills, capsules, powders, sustained-release formulations and the like. The composition can be formulated as a suppository, with traditional binders and carriers such as triglycerides. Oral formulation can include standard carriers such as pharmaceutical grades of mannitol, lactose, starch, magnesium stearate, sodium saccharine, cellulose, magnesium carbonate, etc. Examples of suitable pharmaceutical carriers are described in “Remington's Pharmaceutical Sciences” by E. W. Martin. Such compositions will contain a therapeutically effective amount of the compound, preferably in purified form, together with a suitable amount of carrier so as to provide the form for proper administration to the patient. The formulation should suit the mode of administration.

[0331] In a preferred embodiment, the composition is formulated in accordance with routine procedures as a pharmaceutical composition adapted for intravenous administration to human beings. Typically, compositions for intravenous administration are solutions in sterile isotonic aqueous buffer. Where necessary, the composition may also include a solubilizing agent and a local anesthetic such as lignocaine to ease pain at the site of the injection. Generally, the ingredients are supplied either separately or mixed together in unit dosage form, for example, as a dry lyophilized powder or water free concentrate in a hermetically sealed container such as an ampoule or sachette indicating the quantity of active agent. Where the composition is to be administered by infusion, it can be dispensed with an infusion bottle containing sterile pharmaceutical grade water or saline. Where the composition is administered by injection, an ampoule of sterile water for injection or saline can be provided so that the ingredients may be mixed prior to administration.

[0332] The compounds of the invention can be formulated as neutral or salt forms. Pharmaceutically acceptable salts include those formed with anions such as those derived from hydrochloric, phosphoric, acetic, oxalic, tartaric acids, etc., and those formed with cations such as those derived from sodium, potassium, ammonium, calcium, ferric hydroxides, isopropylamine, triethylamine, 2-ethylamino ethanol, histidine, procaine, etc.

[0333] The amount of the compound of the invention, which will be effective in the treatment, inhibition and prevention of a disease or disorder associated with aberrant expression and/or activity of a polypeptide of the invention can be determined by standard clinical techniques. In addition, in vitro assays may optionally be employed to help identify optimal dosage ranges. The precise dose to be employed in the formulation will also depend on the route of administration, and the seriousness of the disease or disorder, and should be decided according to the judgment of the practitioner and each patient's circumstances. Effective doses may be extrapolated from dose-response curves derived from in vitro or animal model test systems.

[0334] For antibodies, the dosage administered to a patient is typically 0.1 mg/kg to 100 mg/kg of the patient's body weight. Preferably, the dosage administered to a patient is between 0.1 mg/kg and 20 mg/kg of the patient's body weight, more preferably 1 mg/kg to 10 mg/kg of the patient's body weight. Generally, human antibodies have a longer half-life within the human body than antibodies from other species due to the immune response to the foreign polypeptides. Thus, lower dosages of human antibodies and less frequent administration is often possible. Further, the dosage and frequency of administration of antibodies of the invention may be reduced by enhancing uptake and tissue penetration (e.g., into the brain) of the antibodies by modifications such as, for example, lipidation.

[0335] The invention also provides a pharmaceutical pack or kit comprising one or more containers filled with one or more of the ingredients of the pharmaceutical compositions of the invention. Optionally associated with such container(s) can be a notice in the form prescribed by a governmental agency regulating the manufacture, use or sale of pharmaceuticals or biological products, which notice reflects approval by the agency of manufacture, use or sale for human administration.

[0336] Diagnosis and Imaging

[0337] Labeled antibodies, and derivatives and analogs thereof, which specifically bind to a polypeptide of interest can be used for diagnostic purposes to detect, diagnose, or monitor diseases, disorders, and/or conditions associated with the aberrant expression and/or activity of a polypeptide of the invention. The invention provides for the detection of aberrant expression of a polypeptide of interest, comprising (a) assaying the expression of the polypeptide of interest in cells or body fluid of an individual using one or more antibodies specific to the polypeptide interest and (b) comparing the level of gene expression with a standard gene expression level, whereby an increase or decrease in the assayed polypeptide gene expression level compared to the standard expression level is indicative of aberrant expression.

[0338] The invention provides a diagnostic assay for diagnosing a lung disorder, comprising (a) assaying the expression of the polypeptide of interest in cells or body fluid of an individual using one or more antibodies specific to the polypeptide interest and (b) comparing the level of gene expression with a standard gene expression level, whereby an increase or decrease in the assayed polypeptide gene expression level compared to the standard expression level is indicative of a particular disorder. With respect to cancer, the presence of a relatively high amount of transcript in biopsied tissue from an individual may indicate a predisposition for the development of the disease, or may provide a means for detecting the disease prior to the appearance of actual clinical symptoms. A more definitive diagnosis of this type may allow health professionals to employ preventative measures or aggressive treatment earlier thereby preventing the development or further progression of the cancer.

[0339] Antibodies of the invention can be used to assay protein levels in a biological sample using classical immunohistological methods known to those of skill in the art (e.g., see Jalkanen et al., J. Cell. Biol. 101:976-985 (1985); Jalkanen et al., J. Cell. Biol. 105:3087-3096 (1987)). Other antibody-based methods useful for detecting protein gene expression include immunoassays, such as the enzyme linked immunosorbent assay (ELISA) and the radioimmunoassay (RIA). Suitable antibody assay labels are known in the art and include enzyme labels, such as, glucose oxidase; radioisotopes, such as iodine (1251, 1211), carbon (14C), sulfur (35S), tritium (3H), indium (112In), and technetium (99Tc); luminescent labels, such as luminol; and fluorescent labels, such as fluorescein and rhodamine, and biotin.

[0340] One facet of the invention is the detection and diagnosis of a disease or disorder associated with aberrant expression of a polypeptide of interest in an animal, preferably a mammal and most preferably a human. A preferred embodiment of the invention is the detection and diagnosis of a disease or disorder of the lung-associated with aberrant expression of a lung antigen in an animal, preferably a mammal and most preferably a human. In one embodiment, diagnosis comprises: a) administering (for example, parenterally, subcutaneously, or intraperitoneally) to a subject an effective amount of a labeled molecule which specifically binds to the polypeptide of interest; b) waiting for a time interval following the administering for permitting the labeled molecule to preferentially concentrate at sites in the subject where the polypeptide is expressed (and for unbound labeled molecule to be cleared to background level); c) determining background level; and d) detecting the labeled molecule in the subject, such that detection of labeled molecule above the background level indicates that the subject has a particular disease or disorder associated with aberrant expression of the polypeptide of interest. Background level can be determined by various methods including, comparing the amount of labeled molecule detected to a standard value previously determined for a particular system.

[0341] It will be understood in the art that the size of the subject and the imaging system used will determine the quantity of imaging moiety needed to produce diagnostic images. In the case of a radioisotope moiety, for a human subject, the quantity of radioactivity injected will normally range from about 5 to 20 millicuries of 99mTc. The labeled antibody or antibody fragment will then preferentially accumulate at the location of cells which contain the specific protein. In vivo tumor imaging is described in S. W. Burchiel et al., “Immunopharmacokinetics of Radiolabeled Antibodies and Their Fragments.” (Chapter 13 in Tumor Imaging: The Radiochemical Detection of Cancer, S. W. Burchiel and B. A. Rhodes, eds., Masson Publishing Inc. (1982)).

[0342] Depending on several variables, including the type of label used and the mode of administration, the time interval following the administration for permitting the labeled molecule to preferentially concentrate at sites in the subject and for unbound labeled molecule to be cleared to background level is 6 to 48 hours or 6 to 24 hours or 6 to 12 hours. In another embodiment the time interval following administration is 5 to 20 days or 5 to 10 days.

[0343] In an embodiment, monitoring of the disease or disorder is carried out by repeating the method for diagnosing the disease or disorder, for example, one month after initial diagnosis, six months after initial diagnosis, one year after initial-diagnosis, etc.

[0344] Presence of the labeled molecule can be detected in the patient using methods known in the art for in vivo scanning. These methods depend upon the type of label used. Skilled artisans will be able to determine the appropriate method for detecting a particular label. Methods and devices that may be used in the diagnostic methods of the invention include, but are not limited to, computed tomography (CT), whole body scan such as position emission tomography (PET), magnetic resonance imaging (MRI), and sonography.

[0345] In a specific embodiment, the molecule is labeled with a radioisotope and is detected in the patient using a radiation responsive surgical instrument (Thurston et al., U.S. Pat. No. 5,441,050). In another embodiment, the molecule is labeled with a fluorescent compound and is detected in the patient using a fluorescence responsive scanning instrument. In another embodiment, the molecule is labeled with a positron emitting metal and is detected in the patent using positron emission-tomography. In yet another embodiment, the molecule is labeled with a paramagnetic label and is detected in a patient using magnetic resonance imaging (MRI).

[0346] Kits

[0347] The present invention provides kits that can be used in the above methods. In one embodiment, a kit comprises an antibody of the invention, preferably a purified antibody, in one or more containers. In a specific embodiment, the kits of the present invention contain a substantially isolated polypeptide comprising an epitope which is specifically immunoreactive with an antibody included in the kit. Preferably, the kits of the present invention further comprise a control antibody which does not react with the polypeptide of interest. In another specific embodiment, the kits of the present invention contain a means for detecting the binding of an antibody to a polypeptide of interest (e.g., the antibody may be conjugated to a detectable substrate such as a fluorescent compound, an enzymatic substrate, a radioactive compound or a luminescent compound, or a second antibody which recognizes the first antibody may be conjugated to a detectable substrate).

[0348] In another specific embodiment of the present invention, the kit is a diagnostic kit for use in screening serum containing antibodies specific against proliferative and/or cancerous polynucleotides and polypeptides. Such a kit may include a control antibody that does not react with the polypeptide of interest. Such a kit may include a substantially isolated polypeptide antigen comprising an epitope, which is specifically immunoreactive with at least one anti-polypeptide antigen antibody. Further, such a kit includes means for detecting the binding of said antibody to the antigen (e.g., the antibody may be conjugated to a fluorescent compound such as fluorescein or rhodamine, which can be detected by flow cytometry). In specific embodiments, the kit may include a recombinantly produced or chemically synthesized polypeptide antigen. The polypeptide antigen of the kit may also be attached to a solid support.

[0349] In a more specific embodiment the detecting means of the above-described kit includes a solid support to which said polypeptide antigen is attached. Such a kit may also include a non-attached reporter-labeled anti-human antibody. In this embodiment, binding of the antibody to the polypeptide antigen can be detected by binding of the said reporter-labeled antibody.

[0350] In an additional embodiment, the invention includes a diagnostic kit for use in screening serum containing antigens of the polypeptide of the invention. The diagnostic kit includes a substantially isolated antibody specifically immunoreactive with polypeptide or polynucleotide antigens, and means for detecting the binding of the polynucleotide or polypeptide antigen to the antibody. In one embodiment, the antibody is attached to a solid support. In a specific embodiment, the antibody may be a monoclonal antibody. The detecting means of the kit may include a second, labeled monoclonal antibody. Alternatively, or in addition, the detecting means may include a labeled, competing antigen.

[0351] In one diagnostic configuration, test serum is reacted with a solid phase reagent having a surface-bound antigen obtained by the methods of the present invention. After binding with specific antigen antibody to the reagent and removing unbound serum components by washing, the reagent is reacted with reporter-labeled anti-human antibody to bind reporter to the reagent in proportion to the amount of bound anti-antigen antibody on the solid support. The reagent is again washed to remove unbound labeled antibody, and the amount of reporter associated with the reagent is determined. Typically, the reporter is an enzyme, which is detected by incubating the solid phase in the presence of a suitable fluorometric, luminescent or calorimetric substrate (Sigma, St. Louis, Mo.).

[0352] The solid surface reagent in the above assay is prepared by known techniques for attaching protein material to solid support material, such as polymeric beads, dip sticks, 96-well plate or filter material. These attachment methods generally include non-specific adsorption of the protein to the support or covalent attachment of the protein, typically through a free amine group, to a chemically reactive group on the solid support, such as an activated carboxyl, hydroxyl, or aldehyde group. Alternatively, streptavidin coated plates can be used in conjunction with biotinylated antigen(s).

[0353] Thus, the invention provides an assay system or kit for carrying out this diagnostic method. The kit generally includes a support with surface-bound recombinant antigens, and a reporter-labeled anti-human antibody for detecting surface-bound anti-antigen antibody.

[0354] Uses of the Polynucleotides

[0355] Each of the polynucleotides identified herein can be used in numerous ways as reagents. The following description should be considered exemplary and utilizes known techniques.

[0356] The polynucleotides of the present invention are useful for chromosome identification. There exists an ongoing need to identify new chromosome markers, since few chromosome marking reagents, based on actual sequence data (repeat polymorphisms), are presently available. Each sequence is specifically targeted to and can hybridize with a particular location on an individual human chromosome, thus each polynucleotide of the present invention can routinely be used as a chromosome marker using techniques known in the art. Table 1A, column 8 provides the chromosome location of some of the polynucleotides of the invention.

[0357] Briefly, sequences can be mapped to chromosomes by preparing PCR primers (preferably at least 15 bp (e.g., 15-25 bp) from the sequences shown in SEQ ID NO:X. Primers can optionally be selected using computer analysis so that primers do not span more than one predicted exon in the genomic DNA. These primers are then used for PCR screening of somatic cell hybrids containing individual human chromosomes. Only those hybrids containing the human gene corresponding to SEQ ID NO:X will yield an amplified fragment.

[0358] Similarly, somatic hybrids provide a rapid method of PCR mapping the polynucleotides to particular chromosomes. Three or more clones can be assigned per day using a single thermal cycler. Moreover, sublocalization of the polynucleotides can be achieved with panels of specific chromosome fragments. Other gene mapping strategies that can be used include in situ hybridization, prescreening with labeled flow-sorted chromosomes, preselection by hybridization to construct chromosome specific-cDNA libraries, and computer mapping techniques (See, e.g., Shuler, Trends Biotechnol 16:456-459 (1998) which is hereby incorporated by reference in its entirety).

[0359] Precise chromosomal location of the polynucleotides can also be achieved using fluorescence in situ hybridization (FISH) of a metaphase chromosomal spread. This technique uses polynucleotides as short as 500 or 600 bases; however, polynucleotides 2,000-4,000 bp are preferred. For a review of this technique, see Verma et al., “Human Chromosomes: a Manual of Basic Techniques,” Pergamon Press, New York (1988).

[0360] For chromosome mapping, the polynucleotides can be used individually (to mark a single chromosome or a single site on that chromosome) or in panels (for marking multiple sites and/or multiple chromosomes).

[0361] Thus, the present invention also provides a method for chromosomal localization which involves (a) preparing PCR primers from the polynucleotide sequences in Table 1A and/or Table 2 and SEQ ID NO:X and (b) screening somatic cell hybrids containing individual chromosomes.

[0362] The polynucleotides of the present invention would likewise be useful for radiation hybrid mapping, HAPPY mapping, and long range restriction mapping. For a review of these techniques and others known in the art, see, e.g. Dear, “Genome Mapping: A Practical Approach,” IRL Press at Oxford University Press, London (1997); Aydin, J. Mol. Med. 77:691-694 (1999); Hacia et al., Mol. Psychiatry 3:483-492 (1998); Herrick et al., Chromosome Res. 7:409-423 (1999); Hamilton et al., Methods Cell Biol. 62:265-280 (2000); and/or Ott, J. Hered. 90:68-70 (1999), each of which is hereby incorporated by reference in its entirety.

[0363] Once a polynucleotide has been mapped to a precise chromosomal location, the physical position of the polynucleotide can be used in linkage analysis. Linkage analysis establishes coinheritance between a chromosomal location and presentation of a particular disease. (Disease mapping data are found, for example, in V. McKusick, Mendelian Inheritance in Man (available on line through Johns Hopkins University Welch Medical Library).) Column 9 of Table 1A provides an OMIM reference identification number of diseases associated with the cytologic band disclosed in column 8 of Table 1A, as determined using techniques described herein and by reference to Table 5. Assuming 1 megabase mapping resolution and one gene per 20 kb, a cDNA precisely localized to a chromosomal region associated with the disease could be one of 50-500 potential causative genes.

[0364] Thus, once coinheritance is established, differences in a polynucleotide of the invention and the corresponding gene between affected and unaffected individuals can be examined. First, visible structural alterations in the chromosomes, such as deletions or translocations, are examined in chromosome spreads or by PCR. If no structural alterations exist, the presence of point mutations are ascertained. Mutations observed in some or all affected individuals, but not in normal individuals, indicate that the mutation may cause the disease. However, complete sequencing of the polypeptide and the corresponding gene from several normal individuals is required to distinguish the mutation from a polymorphism. If a new polymorphism is identified, this polymorphic polypeptide can be used for further linkage analysis.

[0365] Furthermore, increased or decreased expression of the gene in affected individuals as compared to unaffected individuals can be assessed using the polynucleotides of the invention. Any of these alterations (altered expression, chromosomal rearrangement, or mutation) can be used as a diagnostic or prognostic marker. Diagnostic and prognostic methods, kits and reagents encompassed by the present invention are briefly described below and more thoroughly elsewhere herein (see e.g., the sections labeled “Antibodies”, “Diagnostic Assays”, and “Methods for Detecting Lung Disease, Including Cancer”).

[0366] Thus, the invention also provides a diagnostic method useful during diagnosis of a disorder, involving measuring the expression level of polynucleotides of the present invention in cells or body fluid from an individual and comparing the measured gene expression level with a standard level of polynucleotide expression level, whereby an increase or decrease in the gene expression level compared to the standard is indicative of a disorder. Additional non-limiting examples of diagnostic methods encompassed by the present invention are more thoroughly described elsewhere herein (see, e.g., Example 12).

[0367] In still another embodiment, the invention includes a kit for analyzing samples for the presence of proliferative and/or cancerous polynucleotides derived from a test subject, as further described herein. In a general embodiment, the kit includes at least one polynucleotide probe containing a nucleotide sequence that will specifically hybridize with a polynucleotide of the invention and a suitable container. In a specific embodiment, the kit includes two polynucleotide probes defining an internal region of the polynucleotide of the invention, where each probe has one strand containing a 31′mer-end internal to the region. In a further embodiment, the probes may be useful as primers for polymerase chain reaction amplification.

[0368] Where a diagnosis of a related disorder, including, for example, diagnosis of a tumor, has already been made according to conventional methods, the present invention is useful as a prognostic indicator, whereby patients exhibiting enhanced or depressed polynucleotide of the invention expression will experience a worse clinical outcome relative to patients expressing the gene at a level nearer the standard level.

[0369] By “measuring the expression level of polynucleotides of the invention” is intended qualitatively or quantitatively measuring or estimating the level of the polypeptide of the invention or the level of the mRNA encoding the polypeptide of the invention in a first biological sample either directly (e.g., by determining or estimating absolute protein level or mRNA level) or relatively (e.g., by comparing to the polypeptide level or mRNA level in a second biological sample). Preferably, the polypeptide level or mRNA level in the first biological sample is measured or estimated and compared to a standard polypeptide level or mRNA level, the standard being taken from a second biological sample obtained from an individual not having the related disorder or being determined by averaging levels from a population of individuals not having a related disorder. As will be appreciated in the art, once a standard polypeptide level or mRNA level is known, it can be used repeatedly as a standard for comparison.

[0370] By “biological sample” is intended any biological sample obtained from an individual, body fluid, cell line, tissue culture, or other source which contains polypeptide of the present invention or the corresponding mRNA. As indicated, biological samples include body fluids (such as semen, lymph, vaginal pool, sera, plasma, urine, synovial fluid and spinal fluid) which contain the polypeptide of the present invention, and tissue sources found to express the polypeptide of the present invention. Methods for obtaining tissue biopsies and body fluids from mammals are well known in the art. Where the biological sample is to include mRNA, a tissue biopsy is the preferred source.

[0371] The method(s) provided above may preferably be applied in a diagnostic method and/or kits in which polynucleotides and/or polypeptides of the invention are attached to a solid support. In one exemplary method, the support may be a “gene chip” or a “biological chip” as described in U.S. Pat. Nos. 5,837,832, 5,874,219, and 5,856,174. Further, such a gene chip with polynucleotides of the invention attached may be used to identify polymorphisms between the isolated polynucleotide sequences of the invention, with polynucleotides isolated from a test subject. The knowledge of such polymorphisms (i.e., their location, as well as, their existence) would be beneficial in identifying disease loci for many disorders, such as for example, in neural disorders, immune system disorders, muscular disorders, reproductive disorders, gastrointestinal disorders, pulmonary disorders, digestive disorders, cardiovascular disorders, renal disorders, proliferative disorders, and/or cancerous diseases and conditions. Such a method is described in U.S. Pat. Nos. 5,858,659 and 5,856,104. The U.S. Patents referenced supra are hereby incorporated by reference in their entirety herein.

[0372] The present invention encompasses polynucleotides of the present invention that are chemically synthesized, or reproduced as peptide nucleic acids (PNA), or according to other methods known in the art. The use of PNAs would serve as the preferred form if the polynucleotides of the invention are incorporated onto a solid support, or gene chip. For the purposes of the present invention, a peptide nucleic acid (PNA) is a polyamide type of DNA analog and the monomeric units for adenine, guanine, thymine and cytosine are available commercially (Perceptive Biosystems). Certain components of DNA, such as phosphorus, phosphorus oxides, or deoxyribose derivatives, are not present in PNAs. As disclosed by Nielsen et al., Science 254:1497 (1991); and Egholm et al., Nature 365:666 (1993), PNAs bind specifically and tightly to complementary DNA strands and are not degraded by nucleases. In fact, PNA binds more strongly to DNA than DNA itself does. This is probably because there is no electrostatic repulsion between the two strands, and also the polyamide backbone is more flexible. Because of this, PNA/DNA duplexes bind under a wider range of stringency conditions than DNA/DNA duplexes, making it easier to perform multiplex hybridization. Smaller probes can be used than with DNA due to the strong binding. In addition, it is more likely that single base mismatches can be determined with PNA/DNA hybridization because a single mismatch in a PNA/DNA 15-mer lowers the melting point (T.sub.m) by 8°-20° C., vs. 4°-16° C. for the DNA/DNA 15-mer duplex. Also, the absence of charge groups in PNA means that hybridization can be done at low ionic strengths and reduce possible interference by salt during the analysis.

[0373] The compounds of the present invention have uses which include, but are not limited to, detecting cancer in mammals. In particular the invention is useful during diagnosis of pathological cell proliferative neoplasias which include, but are not limited to: acute myelogenous leukemias including acute monocytic leukemia, acute myeloblastic leukemia, acute promyelocytic leukemia, acute myelomonocytic leukemia, acute erythroleukemia, acute megakaryocytic leukemia, and acute undifferentiated leukemia, etc.; and chronic myelogenous leukemias including chronic myelomonocytic leukemia, chronic granulocytic leukemia, etc. Preferred mammals include monkeys, apes, cats, dogs, cows, pigs, horses, rabbits and humans. Particularly preferred are humans.

[0374] The compounds of the present invention have preferred uses which include, but are not limited to, detecting lung cancer in mammals. In particular the invention is useful during diagnosis of pathological cell proliferative neoplasias, which include, but are not limited to: neoplasms and/or cancers of the lung, including, but not limited to, squamous cell carcinoma, small cell (oat cell) carcinoma, large cell carcinoma, and adenocarcinoma, and/or those disorders associated with the lung as described under “Respiratory Disorders” below. Preferred mammals include monkeys, apes, cats, dogs, cows, pigs, horses, rabbits and humans. Particularly preferred are humans.

[0375] Pathological cell proliferative disorders are often associated with inappropriate activation of proto-oncogenes. (Gelmann, E. P. et al., “The Etiology of Acute Leukemia: Molecular Genetics and Viral Oncology,” in Neoplastic Diseases of the Blood, Vol 1., Wiernik, P. H. et al. eds., 161-182 (1985)). Neoplasias are now believed to result from the qualitative alteration of a normal cellular gene product, or from the quantitative modification of gene expression by insertion into the chromosome of a viral sequence, by chromosomal translocation of a gene to a more actively transcribed region, or by some other mechanism. (Gelmann et al., supra) It is likely that mutated or altered expression of specific genes is involved in the pathogenesis of some leukemias, among other tissues and cell types. (Gelmann et al., supra) Indeed, the human counterparts of the oncogenes involved in some animal neoplasias have been amplified or translocated in some cases of human leukemia and carcinoma. (Gelmann et al., supra)

[0376] For example, c-myc expression is highly amplified in the non-lymphocytic leukemia cell line HL-60. When HL-60 cells are chemically induced to stop proliferation, the level of c-myc is found to be downregulated. (International Publication Number WO 91/15580). However, it has been shown that exposure of HL-60 cells to a DNA construct that is complementary to the 5′ end of c-myc or c-myb blocks translation of the corresponding mRNAs which downregulates expression of the c-myc or c-myb proteins and causes arrest of cell proliferation and differentiation of the treated cells. (International Publication Number WO 91/15580; Wickstrom et al., Proc. Natl. Acad. Sci. 85:1028 (1988); Anfossi et al., Proc. Natl. Acad. Sci. 86:3379 (1989)). However, the skilled artisan would appreciate the present invention's usefulness is not be limited to treatment, prevention, diagnosis and/or prognosis, of proliferative disorders of cells and tissues of hematopoietic origin, in light of the numerous cells and cell types of varying origins which are known to exhibit proliferative phenotypes. In preferred embodiments, the compounds and/or methods of the invention are used to treat, prevent, diagnose, and/or prognose, proliferative disorders of lung cells and tissues.

[0377] In addition to the foregoing, a polynucleotide of the present invention can be used to control gene expression through triple helix formation or through antisense DNA or RNA. Antisense techniques are discussed, for example, in Okano, J. Neurochem. 56: 560 (1991); “Oligodeoxynucleotides as Antisense Inhibitors of Gene Expression, CRC Press, Boca Raton, Fla. (1988). Triple helix formation is discussed in, for instance Lee et al., Nucleic Acids Research 6: 3073 (1979); Cooney et al., Science 241: 456 (1988); and Dervan et al., Science 251: 1360 (1991). Both methods rely on binding of the polynucleotide to a complementary DNA or RNA. For these techniques, preferred polynucleotides are usually oligonucleotides 20 to 40 bases in length and complementary to either the region of the gene involved in transcription (triple helix—see Lee et al., Nucl. Acids Res. 6:3073 (1979); Cooney et al., Science 241:456 (1988); and Dervan et al., Science 251:1360 (1991)) or to the mRNA itself (antisense—Okano, J. Neurochem. 56:560 (1991); Oligodeoxy-nucleotides as Antisense Inhibitors of Gene Expression, CRC Press, Boca Raton, Fla. (1988).) Triple helix formation optimally results in a shut-off of RNA transcription from DNA, while antisense RNA hybridization blocks translation of an mRNA molecule into polypeptide. The oligonucleotide described above can also be delivered to cells such that the antisense RNA or DNA may be expressed in vivo to inhibit production of polypeptide of the present invention antigens. Both techniques are effective in model systems, and the information disclosed herein can be used to design antisense or triple helix polynucleotides in an effort to treat disease, and in particular, for the treatment of proliferative diseases and/or conditions. Non-limiting antisense and triple helix methods encompassed by the present invention are more thoroughly described elsewhere herein (see, e.g., the section labeled “Antisense and Ribozyme (Antagonists)”).

[0378] Polynucleotides of the present invention are also useful in gene therapy. One goal of gene therapy is to insert a normal gene into an organism having a defective gene, in an effort to correct the genetic defect. The polynucleotides disclosed in the present invention offer a means of targeting such genetic defects in a highly accurate manner. Another goal is to insert a new gene that was not present in the host genome, thereby producing a new trait in the host cell. Additional non-limiting examples of gene therapy methods encompassed by the present invention are more thoroughly described elsewhere herein (see, e.g., the sections labeled “Gene Therapy Methods” and Examples 16, 17 and 18).

[0379] The polynucleotides are also useful for identifying individuals from minute biological samples. The United States military, for example, is considering the use of restriction fragment length polymorphism (RFLP) for identification of its personnel. In this technique, an individual's genomic DNA is digested with one or more restriction enzymes, and probed on a Southern blot to yield unique bands for identifying personnel. This method does not suffer from the current limitations of “Dog Tags” which can be lost, switched, or stolen, making positive identification difficult. The polynucleotides of the present invention can be used as additional DNA markers for RFLP.

[0380] The polynucleotides of the present invention can also be used as an alternative to RFLP, by determining the actual base-by-base DNA sequence of selected portions of an individual's genome. These sequences can be used to prepare PCR primers for amplifying and isolating such selected DNA, which can then be sequenced. Using this technique, individuals can be identified because each individual will have a unique set of DNA sequences. Once an unique ID database is established for an individual, positive identification of that individual, living or dead, can be made from extremely small tissue samples.

[0381] Forensic biology also benefits from using DNA-based identification techniques as disclosed herein. DNA sequences taken from very small biological samples such as tissues, e.g., hair or skin, or body fluids, e.g., blood, saliva, semen, synovial fluid, amniotic fluid, breast milk, lymph, pulmonary sputum or surfactant, urine, fecal matter, etc., can be amplified using PCR. In one prior art technique, gene sequences amplified from polymorphic loci, such as DQa class II HLA gene, are used in forensic biology to identify individuals. (Erlich, H., PCR Technology, Freeman and Co. (1992).) Once these specific polymorphic loci are amplified, they are digested with one or more restriction enzymes, yielding an identifying set of bands on a Southern blot probed with DNA corresponding to the DQa class II HLA gene. Similarly, polynucleotides of the present invention can be used as polymorphic markers for forensic purposes.

[0382] There is also a need for reagents capable of identifying the source of a particular tissue. Such need arises, for example, in forensics when presented with tissue of unknown origin. Appropriate reagents can comprise, for example, DNA probes or primers prepared from the sequences of the present invention, specific to tissues, including but not limited to, those sequences referred to in Table 1A. Panels of such reagents can identify tissue by species and/or by organ type. In a similar fashion, these reagents can be used to screen tissue cultures for contamination. Additional non-limiting examples of such uses are further described herein.

[0383] Because lung antigens are found expressed in the lung, the polynucleotides of the present invention are also useful as hybridization probes for differential identification of the tissue(s) or cell type(s) present in a biological sample. Similarly, polypeptides and antibodies directed to polypeptides of the present invention are useful to provide immunological probes for differential identification of the tissue(s) (e.g., immunobistochemistry assays) or cell type(s) (e.g., immunocytochemistry assays). In a specific embodiment, the polynucleotides of the present invention are also useful as hybridization probes for differential identification of lung tissue(s) or cell type(s) present in a biological sample. Similarly, polypeptides and antibodies directed to polypeptides of the present invention are useful to provide immunological probes for differential identification of lung tissue(s) (e.g., immunohistochemistry assays) or cell type(s) (e.g., immunocytochemistry assays). In addition, for a number of disorders of the above tissues or cells, significantly higher or lower levels of gene expression of the polynucleotides/polypeptides of the present invention may be detected in certain tissues (e.g., tissues expressing polypeptides and/or polynucleotides of the present invention, for example, normal lung or diseased lung tissues, and/or those tissues/cells corresponding to the library source relating to a polynucleotide sequence of the invention as disclosed in column 7 of Table 1A, and/or cancerous and/or wounded tissues) or bodily fluids (e.g., semen, lymph, vaginal pool, serum, plasma, urine, synovial fluid or spinal fluid) taken from an individual having such a disorder, relative to a “standard” gene expression level, i.e., the expression level in healthy tissue from an individual not having the disorder.

[0384] Thus, the invention provides a diagnostic method of a disorder, which involves: (a) assaying gene expression level in cells or body fluid of an individual; (b) comparing the gene expression level with a standard gene expression level, whereby an increase or decrease in the assayed gene expression level compared to the standard expression level is indicative of a disorder.

[0385] In the very least, the polynucleotides of the present invention can be used as molecular weight markers on Southern gels, as diagnostic probes for the presence of a specific mRNA in a particular cell type, as a probe to “subtract-out” known sequences in the process of discovering novel polynucleotides, for selecting and making oligomers for attachment to a “gene chip” or other support, to raise anti-DNA antibodies using DNA immunization techniques, and as an antigen to elicit an immune response.

[0386] Uses of the Polypeptides

[0387] Each of the polypeptides identified herein can be used in numerous ways. The following description should be considered exemplary and utilizes known techniques.

[0388] Polypeptides and antibodies directed to polypeptides of the present invention are useful to provide immunological probes for differential identification of the tissue(s) (e.g., immunohistochemistry assays such as, for example, ABC immunoperoxidase (Hsu et al., J. Histochem. Cytochem. 29:577-580 (1981)) or cell type(s) (e.g., immunocytochemistry assays).

[0389] Antibodies can be used to assay levels of polypeptides encoded by polynucleotides of the invention in a biological sample using classical immunohistological methods known to those of skill in the art (see, e.g., Jalkanen, et al., J. Cell. Biol. 101:976-985 (1985); Jalkanen, et al., J. Cell. Biol. 105:3087-3096 (1987)). Other antibody-based methods useful for detecting protein gene expression include immunoassays, such as the enzyme linked immunosorbent assay (ELISA) and the radioimmunoassay (RIA). Suitable antibody assay labels are known in the art and include enzyme labels, such as, glucose oxidase; radioisotopes, such as iodine (¹³¹I, ¹²⁵I, ¹²³I, ¹²¹I), carbon (¹⁴C), sulfur (³⁵S), tritium (³H), indium (^{115m}In, ^{113m}In, ¹¹²In, ¹¹¹In), and technetium (⁹⁹Tc, ^{99m}Tc), thallium (²⁰¹Ti), gallium (⁶⁸Ga, ⁶⁷Ga), palladium (¹⁰³Pd), molybdenum (⁹⁹Mo), xenon (¹³³Xe), fluorine (¹⁸F), ¹⁵³Sm, ¹⁷⁷Lu, ¹⁵⁹Gd, ¹⁴⁹Pm, ¹⁴⁰La, ¹⁷⁵Yb, ¹⁶⁶Ho, ⁹⁰Y, ⁴⁷Sc, ¹⁸⁶Re, ¹⁸⁸Re, ¹⁴²Pr, ¹⁰⁵Ph, ⁹⁷Ru; luminescent labels, such as luminol; and fluorescent labels, such as fluorescein and rhodamine, and biotin.

[0390] In addition to assaying levels of polypeptide of the present invention in a biological sample, proteins can also be detected in vivo by imaging. Antibody labels or markers for in vivo imaging of protein include those detectable by X-radiography, NMR or ESR. For X-radiography, suitable labels include radioisotopes such as barium or cesium, which emit detectable radiation but are not overtly harmful to the subject. Suitable markers for NMR and ESR include those with a detectable characteristic spin, such as deuterium, which may be incorporated into the antibody by labeling of nutrients for the relevant hybridoma.

[0391] A lung antigen-specific antibody or antibody fragment which has been labeled with an appropriate detectable imaging moiety, such as a radioisotope (for example, ¹³¹I, ¹¹²In, ^{99m}Tc, (¹³¹I, ¹²⁵I, ¹²³I, ¹²¹I), carbon (¹⁴C), sulfur (³⁵S), tritium (³H), indium (^{115m}In, ^{113m}In, ¹¹²In, ¹¹¹In), and technetium (⁹⁹Tc, ^{99m}Tc), thallium (²⁰¹Ti), gallium (⁶⁸Ga, ⁶⁷Ga), palladium (¹⁰³Pd), molybdenum (⁹⁹Mo), xenon (¹³³Xe), fluorine (¹⁸F, ¹⁵³Sm, ¹⁷⁷Lu, ¹⁵⁹Gd, ¹⁴⁹Pm, ¹⁴⁰La, ¹⁷⁵Yb, ¹⁶⁶Ho, ⁹⁰Y, ⁴⁷Sc, ¹⁸⁶Re, ¹⁸⁸Re, ¹⁴²Pr, ¹⁰⁵Rh, ⁹⁷Ru), a radio-opaque substance, or a material detectable by nuclear magnetic resonance, is introduced (for example, parenterally, subcutaneously or intraperitoneally) into the mammal to be examined for a lung disorder. It will be understood in the art that the size of the subject and the imaging system used will determine the quantity of imaging moiety needed to produce diagnostic images. In the case of a radioisotope moiety, for a human subject, the quantity of radioactivity injected will normally range from about 5 to 20 millicuries of ^{99m}Tc. The labeled antibody or antibody fragment will then preferentially accumulate at the location of cells which express the polypeptide encoded by a polynucleotide of the invention. In vivo tumor imaging is described in S. W. Burchiel et al., “Immunopharmacokinetics of Radiolabeled Antibodies and Their Fragments” (Chapter 13 in Tumor Imaging: The Radiochemical Detection of Cancer, S. W. Burchiel and B. A. Rhodes, eds., Masson Publishing Inc. (1982)).

[0392] In one embodiment, the invention provides a method for the specific delivery of compositions of the invention to cells by administering polypeptides of the invention (e.g., polypeptides encoded by polynucleotides of the invention and/or antibodies) that are associated with heterologous polypeptides or nucleic acids. In one example, the invention provides a method for delivering a therapeutic protein into the targeted cell. In another example, the invention provides a method for delivering a single stranded nucleic acid (e.g., antisense or ribozymes) or double stranded nucleic acid (e.g., DNA that can integrate into the cell's genome or replicate episomally and that can be transcribed) into the targeted cell.

[0393] In another embodiment, the invention provides a method for the specific destruction of cells (e.g., the destruction of tumor cells) by administering polypeptides of the invention in association with toxins or cytotoxic prodrugs.

[0394] In a preferred embodiment, the invention provides a method for the specific destruction of lung cells (e.g., aberrant lung cells, lung neoplasm) by administering polypeptides of the invention (e.g., polypeptides encoded by polynucleotides of the invention and/or antibodies) in association with toxins or cytotoxic prodrugs. In another preferred embodiment the invention provides a method for the specific destruction of tissues/cells corresponding to the library source relating to a polynucleotide sequence of the invention as disclosed in column 7 of Table 1A by administering polypeptides of the invention in association with toxins or cytotoxic prodrugs.

[0395] By “toxin” is meant one or more compounds that bind and activate endogenous cytotoxic effector systems, radioisotopes, holotoxins, modified toxins, catalytic subunits of toxins, or any molecules or enzymes not normally present in or on the surface of a cell that under defined conditions cause the cell's death. Toxins that may be used according to the methods of the invention include, but are not limited to, radioisotopes known in the art, compounds such as, for example, antibodies (or complement fixing containing portions thereof) that bind an inherent or induced endogenous cytotoxic effector system, thymidine kinase, endonuclease, RNAse, alpha toxin, ricin, abrin, Pseudomonas exotoxin A, diphtheria toxin, saporin, momordin, gelonin, pokeweed antiviral protein, alpha-sarcin and cholera toxin. “Toxin” also includes a cytostatic or cytocidal agent, a therapeutic agent or a radioactive metal ion, e.g., alpha-emitters such as, for example, ²¹³Bi, or other radioisotopes such as, for example, ¹⁰³Pd, ¹³³Xe, ¹³¹I, ¹¹¹I, ⁶⁸Ge, ⁵⁷Co, ⁶⁵Zn, ⁸⁵Sr, ³²P, ³⁵S, ⁹⁰Y, ¹⁵³Sm, ¹⁵³Gd, ¹⁶⁹Yb, ⁵¹Cr, ⁵⁴Mn, ⁷⁵Se, ¹¹³Sn, ⁹⁰Yttrium, ¹¹⁷Tin, ¹⁸⁶Rhenium, ¹⁶⁶Holmium, and ¹⁸⁸Rhenium; luminescent labels, such as luminol; and fluorescent labels, such as fluorescein and rhodamine, and biotin.

[0396] In a specific embodiment, the invention provides a method for the specific destruction of cells (e.g., the destruction of tumor cells) by administering polypeptides of the invention or antibodies of the invention in association with the radioisotope ⁹⁰Y. In another specific embodiment, the invention provides a method for the specific destruction of cells (e.g., the destruction of tumor cells) by administering polypeptides of the invention or antibodies of the invention in association with the radioisotope ¹¹¹In. In a further specific embodiment, the invention provides a method for the specific destruction of cells (e.g., the destruction of tumor cells) by administering polypeptides of the invention or antibodies of the invention in association with the radioisotope ¹³¹I.

[0397] Techniques known in the art may be applied to label polypeptides of the invention (including antibodies). Such techniques include, but are not limited to, the use of bifunctional conjugating agents (see e.g., U.S. Pat. Nos. 5,756,065; 5,714,631; 5,696,239; 5,652,361; 5,505,931; 5,489,425; 5,435,990; 5,428,139; 5,342,604; 5,274,119; 4,994,560; and 5,808,003; the contents of each of which are hereby incorporated by reference in its entirety).

[0398] Thus, the invention provides a diagnostic method of a disorder, which involves (a) assaying the expression level of a polypeptide of the present invention in cells or body fluid of an individual; and (b) comparing the assayed polypeptide expression level with a standard polypeptide expression level, whereby an increase or decrease in the assayed polypeptide expression level compared to the standard expression level is indicative of a disorder. With respect to cancer, the presence of a relatively high amount of transcript in biopsied tissue from an individual may indicate a predisposition for the development of the disease, or may provide a means for detecting the disease prior to the appearance of actual clinical symptoms. A more definitive diagnosis of this type may allow health professionals to employ preventative measures or aggressive treatment earlier thereby preventing the development or further progression of the cancer.

[0399] Moreover, polypeptides of the present invention can be used to treat or prevent diseases or conditions of the lung such as, for example, allergic disorders (eosinophilic pneumonia, hypersensitivity pneumonitis (e.g., extrinsic allergic alveolitis, allergic interstitial pneumonitis, organic dust pneumoconiosis), asthma), pneumonia (e.g., bacterial, viral , fungal, atypical, and opportunistic infection), pleural disorders (e.g., pleurisy, pleural effusion, and pneumothorax), obstructive airway diseases (e.g., asthma, chronic obstructive pulmonary disease (COPD), emphysema, chronic or acute bronchitis), occupational lung diseases (e.g., silicosis, black lung, occupational asthsma, byssinosis, and benign pneumoconioses), Infiltrative Lung Disease (e.g., pulmonary fibrosis, idiopathic pulmonary fibrosis, and desquamative interstitial pneumonia), histiocytosis X, sarcoidosis and pulmonary alveolar proteinosis), Acute respiratory distress syndrome (also called, e.g., adult respiratory distress syndrome), edema, pulmonary embolism, bronchitis (e.g., viral, bacterial), bronchiectasis, atelectasis, lung abscess, cystic fibrosis, neoplasms and/or cancers of the lung, including, but not limited to, squamous cell carcinoma, small cell (oat cell) carcinoma, large cell carcinoma, and adenocarcinoma, and/or those disorders associated with the lung as described under “Respiratory Disorders” below. In preferred embodiments, polynucleotides expressed in a particular tissue type (see, e.g., Table 1A, column 7) are used to diagnose, detect, prevent, treat and/or prognose disorders associated with the tissue type. For example, patients can be administered a polypeptide of the present invention in an effort to replace absent or decreased levels of the polypeptide (e.g., insulin), to supplement absent or decreased levels of a different polypeptide (e.g., hemoglobin S for hemoglobin B, SOD, catalase, DNA repair proteins), to inhibit the activity of a polypeptide (e.g., an oncogene or tumor suppressor), to activate the activity of a polypeptide (e.g., by binding to a receptor), to reduce the activity of a membrane bound receptor by competing with it for free ligand (e.g., soluble TNF receptors used in reducing inflammation), or to bring about a desired response (e.g., blood vessel growth inhibition, enhancement of the immune response to proliferative cells or tissues).

[0400] Similarly, antibodies directed to a polypeptide of the present invention can also be used to treat disease (as described supra, and elsewhere herein). For example, administration of an antibody directed to a polypeptide of the present invention can bind, and/or neutralize the polypeptide, and/or reduce overproduction of the polypeptide. Similarly, administration of an antibody can activate the polypeptide, such as by binding to a polypeptide bound to a membrane (receptor).

[0401] At the very least, the polypeptides of the present invention can be used as molecular weight markers on SDS-PAGE gels or on molecular sieve gel filtration columns using methods well known to those of skill in the art. Polypeptides can also be used to raise antibodies, which in turn are used to measure protein expression from a recombinant cell, as a way of assessing transformation of the host cell. Moreover, the polypeptides of the present invention can be used to test the biological activities described herein.

[0402] Diagnostic Assays

[0403] The compounds of the present invention are useful for diagnosis, treatment, prevention and/or prognosis of various lung related disorders in mammals, preferably humans. Such disorders include, but are not limited to, allergic disorders (eosinophilic pneumonia, hypersensitivity pneumonitis (e.g., extrinsic allergic alveolitis, allergic interstitial pneumonitis, organic dust pneumoconiosis), asthma), pneumonia (e.g., bacterial, viral, fungal, atypical, and opportunistic infection), pleural disorders (e.g., pleurisy, pleural effusion, and pneumothorax), obstructive airway diseases (e.g., asthma, chronic obstructive pulmonary disease (COPD), emphysema, chronic or acute bronchitis), occupational lung diseases (e.g., silicosis, black lung, occupational asthsma, byssinosis, and benign pneumoconioses), Infiltrative Lung Disease (e.g., pulmonary fibrosis, idiopathic pulmonary fibrosis, and desquamative interstitial pneumonia), histiocytosis X, sarcoidosis and pulmonary alveolar proteinosis), Acute respiratory distress syndrome (also called, e.g., adult respiratory distress syndrome), edema, pulmonary embolism, bronchitis (e.g., viral, bacterial), bronchiectasis, atelectasis, lung abscess, cystic fibrosis, neoplasms and/or cancers of the lung, including, but not limited to, squamous cell carcinoma, small cell (oat cell) carcinoma, large cell carcinoma, and adenocarcinoma, and/or those disorders associated with the lung as described under “Respiratory Disorders” below. In preferred embodiments, polynucleotides expressed in a particular tissue type (see, e.g., Table 1A, column 7) are used to diagnose, detect, prevent, treat and/or prognose disorders associated with the tissue type.

[0404] Lung antigens are expressed in the lung, with an increased expression level in lung tissues. For a number of lung-related disorders, substantially altered (increased or decreased) levels of lung antigen gene expression can be detected in lung tissue or other cells or bodily fluids (e.g., sera, plasma, urine, semen, synovial fluid or spinal fluid) taken from an individual having such a disorder, relative to a “standard” lung antigen gene expression level, that is, the lung antigen expression level in lung tissues or bodily fluids from an individual not having the lung disorder. Thus, the invention provides a diagnostic method useful during diagnosis of a lung disorder, which involves measuring the expression level of the gene encoding the lung associated polypeptide in lung tissue or other cells or body fluid from an individual and comparing the measured gene expression level with a standard lung antigens gene expression level, whereby an increase or decrease in the gene expression level(s) compared to the standard is indicative of a lung disorder.

[0405] In specific embodiments, the invention provides a diagnostic method useful during diagnosis of a disorder of a normal or diseased tissue/cell source corresponding to column 7 of Table 1A, which involves measuring the expression level of the coding sequence of a polynucleotide sequence associated with this tissue/cell source as disclosed in Table 1A in the tissue/cell source or other cells or body fluid from an individual and comparing the expression level of the coding sequence with a standard expression level of the coding sequence of a polynucleotide sequence, whereby an increase or decrease in the gene expression level(s) compared to the standard is indicative of a disorder of a normal or diseased tissue/cell source corresponding to column 7 of Table 1A.

[0406] In particular, it is believed that certain tissues in mammals with cancer of cells or tissue of the lung express significantly enhanced or reduced levels of normal or altered lung antigen expression and mRNA encoding the lung associated polypeptide when compared to a corresponding “standard” level. Further, it is believed that enhanced or depressed levels of the lung associated polypeptide can be detected in certain body fluids (e.g., sera, plasma, urine, and spinal fluid) or cells or tissue from mammals with such a cancer when compared to sera from mammals of the same species not having the cancer.

[0407] For example, as disclosed herein, lung associated polypeptides of the invention are expressed in the lung. Accordingly, polynucleotides of the invention (e.g., polynucleotide sequences complementary to all or a portion of a lung antigen mRNA nucleotide sequence of SEQ ID NO:X, nucleotide sequence encoding SEQ ID NO:Y, nucleotide sequence encoding a polypeptide encoded by SEQ ID NO:X and/or a nucleotide sequence delineated by columns 8 and 9 of Table 2) and antibodies (and antibody fragments) directed against the polypeptides of the invention may be used to quantitate or qualitate concentrations of cells of the lung expressing lung antigens, preferably on their cell surfaces. These polynucleotides and antibodies additionally have diagnostic applications in detecting abnormalities in the level of lung antigens gene expression, or abnormalities in the structure and/or temporal, tissue, cellular, or subcellular location of lung antigens. These diagnostic assays may be performed in vivo or in vitro, such as, for example, on blood samples, biopsy tissue or autopsy tissue. In specific embodiments, polynucleotides and antibodies of the invention are used to quantitate or qualitate tissues/cells corresponding to the library source disclosed in column 7 of Table 1A expressing the corresponding lung sequence disclosed in the same row of Table 1A, preferably on their cell surface.

[0408] Thus, the invention provides a diagnostic method useful during diagnosis of a lung disorder, including cancers, which involves measuring the expression level of the gene encoding the lung antigen polypeptide in lung tissue or other cells or body fluid from an individual and comparing the measured gene expression level with a standard lung antigen gene expression level, whereby an increase or decrease in the gene expression level compared to the standard is indicative of a lung disorder. In specific embodiments, polynucleotides and antibodies of the invention are used to quantitate or qualitate tissues/cells corresponding to the library source disclosed in column 7 of Table 1A expressing the corresponding lung sequence disclosed in the same row of Table 1A, preferably on their cell surface.

[0409] Where a diagnosis of a disorder in the lung, including diagnosis of a tumor, has already been made according to conventional methods, the present invention is useful as a prognostic indicator, whereby patients exhibiting enhanced or depressed lung antigen gene expression will experience a worse clinical outcome relative to patients expressing the gene at a level nearer the standard level.

[0410] By “assaying the expression level of the gene encoding the lung associated polypeptide” is intended qualitatively or quantitatively measuring or estimating the level of the lung antigen polypeptide or the level of the mRNA encoding the lung antigen polypeptide in a first biological sample either directly (e.g., by determining or estimating absolute protein level or mRNA level) or relatively (e.g., by comparing to the lung associated polypeptide level or mRNA level in a second biological sample). Preferably, the lung antigen polypeptide expression level or mRNA level in the first biological sample is measured or estimated and compared to a standard lung antigen polypeptide level or mRNA level, the standard being taken from a second biological sample obtained from an individual not having the disorder or being determined by averaging levels from a population of individuals not having a disorder of the lung. As will be appreciated in the art, once a standard lung antigen polypeptide level or mRNA level is known, it can be used repeatedly as a standard for comparison.

[0411] By “biological sample” is intended any biological sample obtained from an individual, cell line, tissue culture, or other source containing lung antigen polypeptides (including portions thereof) or mRNA. As indicated, biological samples include body fluids (such as sera, plasma, urine, synovial fluid and spinal fluid) which contain cells expressing lung antigen polypeptides, lung tissue, and other tissue sources found to express the full length or fragments thereof of a lung antigen. Methods for obtaining tissue biopsies and body fluids from mammals are well known in the art. Where the biological sample is to include mRNA, a tissue biopsy is the preferred source.

[0412] Total cellular RNA can be isolated from a biological sample using any suitable technique such as the single-step guanidinium-thiocyanate-phenol-chloroform method described in Chomczynski and Sacchi, Anal. Biochem. 162:156-159 (1987). Levels of mRNA encoding the lung antigen polypeptides are then assayed using any appropriate method. These include Northern blot analysis, S1 nuclease mapping, the polymerase chain reaction (PCR), reverse transcription in combination with the polymerase chain reaction (RT-PCR), and reverse transcription in combination with the ligase chain reaction (RT-LCR).

[0413] The present invention also relates to diagnostic assays such as quantitative and diagnostic assays for detecting levels of lung antigen polypeptides, in a biological sample (e.g., cells and tissues), including determination of normal and abnormal levels of polypeptides. Thus, for instance, a diagnostic assay in accordance with the invention for detecting over-expression of lung antigens compared to normal control tissue samples may be used to detect the presence of tumors. Assay techniques that can be used to determine levels of a polypeptide, such as a lung antigen polypeptide of the present invention in a sample derived from a host are well-known to those of skill in the art. Such assay methods include radioimmunoassays, competitive-binding assays, Western Blot analysis and ELISA assays. Assaying lung antigen polypeptide levels in a biological sample can occur using any art-known method.

[0414] Assaying lung antigen polypeptide levels in a biological sample can occur using antibody-based techniques. For example, lung antigen polypeptide expression in tissues can be studied with classical immunohistological methods (Jalkanen et al., J. Cell. Biol. 101:976-985 (1985); Jalkanen, M., et al., J. Cell . Biol. 105:3087-3096 (1987)). Other antibody-based methods useful for detecting lung antigen polypeptide gene expression include immunoassays, such as the enzyme linked immunosorbent assay (ELISA) and the radioimmunoassay (RIA). Suitable antibody assay labels are known in the art and include enzyme labels, such as, glucose oxidase, and radioisotopes, such as iodine (¹²⁵I, ¹²¹I), carbon (¹⁴C), sulfur (³⁵S), tritium (³H), indium (¹¹²In), and technetium (^{99m}Tc), and fluorescent labels, such as fluorescein and rhodamine, and biotin.

[0415] The tissue or cell type to be analyzed will generally include those which are known, or suspected, to express the lung antigen gene (such as, for example, cells of the lung or lung cancer). The protein isolation methods employed herein may, for example, be such as those described in Harlow and Lane (Harlow, E. and Lane, D., 1988, “Antibodies: A Laboratory Manual”, Cold Spring Harbor Laboratory Press, Cold Spring Harbor, New York), which is incorporated herein by reference in its entirety. The isolated cells can be derived from cell culture or from a patient. The analysis of cells taken from culture may be a necessary step in the assessment of cells that could be used as part of a cell-based gene therapy technique or, alternatively, to test the effect of compounds on the expression of the lung antigen gene.

[0416] For example, antibodies, or fragments of antibodies, such as those described herein, may be used to quantitatively or qualitatively detect the presence of lung antigen gene products or conserved variants or peptide fragments thereof. This can be accomplished, for example, by immunofluorescence techniques employing a fluorescently labeled antibody coupled with light microscopic, flow cytometric, or fluorimetric detection.

[0417] In a preferred embodiment, antibodies, or fragments of antibodies directed to any one or all of the predicted epitope domains of the lung antigen polypeptides (Shown in Table 1A, column 6) may be used to quantitatively or qualitatively detect the presence of lung antigen gene products or conserved variants or peptide fragments thereof. This can be accomplished, for example, by immunofluorescence techniques employing a fluorescently labeled antibody coupled with light microscopic, flow cytometric, or fluorimetric detection.

[0418] In an additional preferred embodiment, antibodies, or fragments of antibodies directed to a conformational epitope of a lung antigen may be used to quantitatively or qualitatively detect the presence of lung antigen gene products or conserved variants or peptide fragments thereof. This can be accomplished, for example, by immunofluorescence techniques employing a fluorescently labeled antibody coupled with light microscopic, flow cytometric, or fluorimetric detection.

[0419] The antibodies (or fragments thereof), and/or lung antigen polypeptides of the present invention may, additionally, be employed histologically, as in immunofluorescence, immunoelectron microscopy or non-immunological assays, for in situ detection of lung antigen gene products or conserved variants or peptide fragments thereof. In situ detection may be accomplished by removing a histological specimen from a patient, and applying thereto a labeled antibody or lung antigen polypeptide of the present invention. The antibody (or fragment thereof) or lung antigen polypeptide is preferably applied by overlaying the labeled antibody (or fragment) onto a biological sample. Through the use of such a procedure, it is possible to determine not only the presence of the lung antigen gene product, or conserved variants or peptide fragments, or lung antigen polypeptide binding, but also its distribution in the examined tissue. Using the present invention, those of ordinary skill will readily perceive that any of a wide variety of histological methods (such as staining procedures) can be modified in order to achieve such in situ detection.

[0420] Immunoassays and non-immunoassays for lung antigen gene products or conserved variants or peptide fragments thereof will typically comprise incubating a sample, such as a biological fluid, a tissue extract, freshly harvested cells, or lysates of cells which have been incubated in cell culture, in the presence of a detectably labeled antibody capable of binding lung antigen gene products or conserved variants or peptide fragments thereof, and detecting the bound antibody by any of a number of techniques well-known in the art.

[0421] The biological sample may be brought in contact with and immobilized onto a solid phase support or carrier such as nitrocellulose, or other solid support which is capable of immobilizing cells, cell particles or soluble proteins. The support may then be washed with suitable buffers followed by treatment with the detectably labeled anti-lung antigen antibody or detectable lung antigen polypeptide. The solid phase support may then be washed with the buffer a second time to remove unbound antibody or polypeptide. Optionally the antibody is subsequently labeled. The amount of bound label on solid support may then be detected by conventional means.

[0422] By “solid phase support or carrier” is intended any support capable of binding an antigen or an antibody. Well-known supports or carriers include glass, polystyrene, polypropylene, polyethylene, dextran, nylon, amylases, natural and modified celluloses, polyacrylamides, gabbros, and magnetite. The nature of the carrier can be either soluble to some extent or insoluble for the purposes of the present invention. The support material may have virtually any possible structural configuration so long as the coupled molecule is capable of binding to an antigen or antibody. Thus, the support configuration may be spherical, as in a bead, or cylindrical, as in the inside surface of a test tube, or the external surface of a rod. Alternatively, the surface may be flat such as a sheet, test strip, etc. Preferred supports include polystyrene beads. Those skilled in the art will know many other suitable carriers for binding antibody or antigen, or will be able to ascertain the same by use of routine experimentation.

[0423] The binding activity of a given lot of anti-lung antigen antibody or lung antigen polypeptide may be determined according to well known methods. Those skilled in the art will be able to determine operative and optimal assay conditions for each determination by employing routine experimentation.

[0424] In addition to assaying lung antigen polypeptide levels or polynucleotide levels in a biological sample obtained from an individual, lung antigen polypeptide or polynucleotide can also be detected in vivo by imaging. For example, in one embodiment of the invention, lung antigen polypeptide and/or anti-lung antigen antibodies are used to image lung diseased cells, such as neoplasms. In another embodiment, lung antigen polynucleotides of the invention (e.g., polynucleotides complementary to all or a portion of lung antigen mRNA) and/or anti-lung antigen antibodies (e.g., antibodies directed to any one or a combination of the epitopes of lung antigens, antibodies directed to a conformational epitope of lung antigens, antibodies directed to the full length polypeptide expressed on the cell surface of a mammalian cell) are used to image diseased or neoplastic cells of the lung.

[0425] Antibody labels or markers for in vivo imaging of lung antigen polypeptides include those detectable by X-radiography, NMR, MRI, CAT-scans or ESR. For X-radiography, suitable labels include radioisotopes such as barium or cesium, which emit detectable radiation but are not overtly harmful to the subject. Suitable markers for NMR and ESR include those with a detectable characteristic spin, such as deuterium, which may be incorporated into the antibody by labeling of nutrients for the relevant hybridoma. Where in vivo imaging is used to detect enhanced levels of lung antigen polypeptides for diagnosis in humans, it may be preferable to use human antibodies or “humanized” chimeric monoclonal antibodies. Such antibodies can be produced using techniques described herein or otherwise known in the art. For example methods for producing chimeric antibodies are known in the art. See, for review, Morrison, Science 229:1202 (1985); Oi et al., BioTechniques 4:214 (1986); Cabilly et al., U.S. Pat. No. 4,816,567; Taniguchi et al., EP 171496; Morrison et al., EP 173494; Neuberger et al., WO 8601533; Robinson et al., WO 8702671; Boulianne et al., Nature 312:643 (1984); Neuberger et al., Nature 314:268 (1985).

[0426] Additionally, any lung antigen polypeptides whose presence can be detected, can be administered. For example, lung antigen polypeptides labeled with a radio-opaque or other appropriate compound can be administered and visualized in vivo, as discussed, above for labeled antibodies. Further such lung antigen polypeptides can be utilized for in vitro diagnostic procedures.

[0427] A lung antigen polypeptide-specific antibody or antibody fragment which has been labeled with an appropriate detectable imaging moiety, such as a radioisotope (for example, ¹³¹I, ¹¹²In, ^{99m}Tc), a radio-opaque substance, or a material detectable by nuclear magnetic resonance, is introduced (for example, parenterally, subcutaneously or intraperitoneally) into the mammal to be examined for a lung disorder. It will be understood in the art that the size of the subject and the imaging system used will determine the quantity of imaging moiety needed to produce diagnostic images. In the case of a radioisotope moiety, for a human subject, the quantity of radioactivity injected will normally range from about 5 to 20 millicuries of ^{99m}Tc. The labeled antibody or antibody fragment will then preferentially accumulate at the location of cells which contain lung antigen protein. In vivo tumor imaging is described in S. W. Burchiel et al., “Immunopharmacokinetics of Radiolabeled Antibodies and Their Fragments” (Chapter 13 in Tumor Imaging: The Radiochemical Detection of Cancer, S. W. Burchiel and B. A. Rhodes, eds., Masson Publishing Inc. (1982)).

[0428] With respect to antibodies, one of the ways in which the anti-lung antigen antibody can be detectably labeled is by linking the same to an enzyme and using the linked product in an enzyme immunoassay (EIA) (Voller, A., “The Enzyme Linked Immunosorbent Assay (ELISA)”, 1978, Diagnostic Horizons 2:1-7, Microbiological Associates Quarterly Publication, Walkersville, Md.); Voller et al., J. Clin. Pathol. 31:507-520 (1978); Butler, J. E., Meth. Enzymol. 73:482-523 (1981); Maggio, E. (ed.), 1980, Enzyme Immunoassay, CRC Press, Boca Raton, Fla.; Ishikawa, E. et al., (eds.), 1981, Enzyme Immunoassay, Kgaku Shoin, Tokyo). The enzyme, which is bound to the antibody will react with an appropriate substrate, preferably a chromogenic substrate, in such a manner as to produce a chemical moiety which can be detected, for example, by spectrophotometric, fluorimetric or by visual means. Enzymes which can be used to delectably label the antibody include, but are not limited to, malate dehydrogenase, staphylococcal nuclease, delta-5-steroid isomerase, yeast alcohol dehydrogenase, alpha-glycerophosphate, dehydrogenase, triose phosphate isomerase, horseradish peroxidase, alkaline phosphatase, asparaginase, glucose oxidase, beta-galactosidase, ribonuclease, urease, catalase, glucose-6-phosphate dehydrogenase, glucoamylase and acetylcholinesterase. Additionally, the detection can be accomplished by calorimetric methods which employ a chromogenic substrate for the enzyme. Detection may also be accomplished by visual comparison of the extent of enzymatic reaction of a substrate in comparison with similarly prepared standards.

[0429] Detection may also be accomplished using any of a variety of other immunoassays. For example, by radioactively labeling the antibodies or antibody fragments, it is possible to detect lung antigens through the use of a radioimmunoassay (RIA) (see, for example, Weintraub, B., Principles of Radioimmunoassays, Seventh Training Course on Radioligand Assay Techniques, The Endocrine Society, March, 1986, which is incorporated by reference herein). The radioactive isotope can be detected by means including, but not limited to, a gamma counter, a scintillation counter, or autoradiography.

[0430] It is also possible to label the antibody with a fluorescent compound. When the fluorescently labeled antibody is exposed to light of the proper wave length, its presence can then be detected due to fluorescence. Among the most commonly used fluorescent labeling compounds are fluorescein isothiocyanate, rhodamine, phycoerythrin, phycocyanin, allophycocyanin, ophthaldehyde and fluorescamine.

[0431] The antibody can also be detectably labeled using fluorescence emitting metals such as ¹⁵²Eu, or others of the lanthanide series. These metals can be attached to the antibody using such metal chelating groups as diethylenetriaminepentacetic acid (DTPA) or ethylenediaminetetraacetic acid (EDTA).

[0432] The antibody also can be detectably labeled by coupling it to a chemiluminescent compound. The presence of the chemiluminescent-tagged antibody is then determined by detecting the presence of luminescence that arises during the course of a chemical reaction. Examples of particularly useful chemiluminescent labeling compounds are luminol, isoluminol, theromatic acridinium ester, imidazole, acridinium salt and oxalate ester.

[0433] Likewise, a bioluminescent compound may be used to label the antibody of the present invention. Bioluminescence is a type of chemiluminescence found in biological systems in, which a catalytic protein increases the efficiency of the chemiluminescent reaction. The presence of a bioluminescent protein is determined by detecting the presence of luminescence. Important bioluminescent compounds for purposes of labeling are luciferin, luciferase and aequorin.

[0434] Methods for Detecting Lung Disease, Including Cancer

[0435] In general, a lung disease or cancer may be detected in a patient based on the presence of one or more lung antigen proteins of the invention and/or polynucleotides encoding such proteins in a biological sample (for example, blood, sera, urine, and/or tumor biopsies) obtained from the patient. In other words, such proteins and/or polynucleotides may be used as markers to indicate the presence or absence of a lung disease or disorder, including cancer. Cancers that may be diagnosed, and/or prognosed using the compositions of the invention include but are not limited to, lung cancer. In addition, such proteins and/or polynucleotides may be useful for the detection of other diseases and cancers, including cancers of tissues/cells corresponding to the library source disclosed in column 7 of Table 1A expressing the corresponding lung sequence disclosed in the same row of Table 1A. The binding agents provided herein generally permit detection of the level of antigen that binds to the agent in the biological sample. Polynucleotide primers and probes may be used to detect the level of mRNA encoding lung antigen polypeptides, which is also indicative of the presence or absence of a lung disease or disorder, including cancer. In general, lung antigen polypeptides should be present at a level that is at least three fold higher in diseased tissue than in normal tissue.

[0436] There are a variety of assay formats known to those of ordinary skill in the art for using a binding agent to detect polypeptide markers in a sample. See, e.g., Harlow and Lane, supra. In general, the presence or absence of a lung disease in a patient may be determined by (a) contacting a biological sample obtained from a patient with a binding agent; (b) detecting in the sample a level of polypeptide that binds to the binding agent; and (c) comparing the level of polypeptide with a predetermined cut-off value.

[0437] In a preferred embodiment, the assay involves the use of binding agent immobilized on a solid support to bind to and remove the lung antigen polypeptide of the invention from the remainder of the sample. The bound polypeptide may then be detected using a detection reagent that contains a reporter group and specifically binds to the binding agent/polypeptide complex. Such detection reagents may comprise, for example, a binding agent that specifically binds to the polypeptide or an antibody or other agent that specifically binds to the binding agent, such as an anti-immunoglobulin, protein G, protein A or a lectin. Alternatively, a competitive assay may be utilized, in which a polypeptide is labeled with a reporter group and allowed to bind to the immobilized binding agent after incubation of the binding agent with the sample. The extent to which components of the sample inhibit the binding of the labeled polypeptide to the binding agent is indicative of the reactivity of the sample with the immobilized binding agent. Suitable polypeptides for use within such assays include lung antigen polypeptides and portions thereof, or antibodies, to which the binding agent binds, as described above.

[0438] The solid support may be any material known to those of skill in the art to which lung antigen polypeptides of the invention may be attached. For example, the solid support may be a test well in a microtiter plate or a nitrocellulose or other suitable membrane. Alternatively, the support may be a bead or disc, such as glass fiberglass, latex or a plastic material such as polystyrene or polyvinylchloride. The support may also be a magnetic particle or a fiber optic sensor, such as those disclosed, for example, in U.S. Pat. No. 5,359,681. The binding agent may be immobilized on the solid support using a variety of techniques known to those of skill in the art, which are amply described in the patent and scientific literature. In the context of the present invention, the term “immobilization” refers to both noncovalent association, such as adsorption, and covalent attachment (which may be a direct linkage between the agent and functional groups on the support or may be a linkage by way of a cross-linking agent). Immobilization by adsorption to a well in a microtiter plate or to a membrane is preferred. In such cases, adsorption may be achieved by contacting the binding agent, in a suitable buffer, with the solid support for the suitable amount of time. The contact time varies with temperature, but is typically between about 1 hour and about 1 day. In general, contacting a well of plastic microtiter plate (such as polystyrene or polyvinylchloride) with an amount of binding agent ranging from about 10 ng to about 10 ug, and preferably about 100 ng to about 1 ug, is sufficient to immobilize an adequate amount of binding agent.

[0439] Covalent attachment of binding agent to a solid support may generally be achieved by first reacting the support with a bifunctional reagent that will react with both the support and a functional group, such as a hydroxyl or amino group, on the binding agent. For example, the binding agent may be covalently attached to supports having an appropriate polymer coating using benzoquinone or by condensation of an aldehyde group on the support with an amine and an active hydrogen on the binding partner (see, e.g., Pierce Immunotechnology Catalog and Handbook, 1991, at A12-A13).

[0440] Gene Therapy Methods

[0441] Also encompassed by the present invention are gene therapy methods for treating or preventing disorders, diseases and conditions. The gene therapy methods relate to the introduction of nucleic acid (DNA, RNA and antisense DNA or RNA) sequences into an animal to achieve expression of a lung antigen of the present invention. This method requires a polynucleotide, which codes for a polypeptide of the present invention operatively linked to a promoter and any other genetic elements necessary for the expression of the polypeptide by the target tissue. Such gene therapy and delivery techniques are known in the art, see, for example, WO90/11092, which is herein incorporated by reference.

[0442] Thus, for example, cells from a patient may be engineered with a polynucleotide (DNA or RNA) comprising a promoter operably linked to a polynucleotide of the present invention ex vivo, with the engineered cells then being provided to a patient to be treated with the polypeptide of the present invention. Such methods are well-known in the art. For example, see Belldegrun, A., et al., J. Natl. Cancer Inst. 85: 207-216 (1993); Ferrantini, M. et al., Cancer Research 53: 1107-1112 (1993); Ferrantini, M. et al., J. Immunology 153: 4604-4615 (1994); Kaido, T., et al., Int. J. Cancer 60: 221-229 (1995); Ogura, H., et al., Cancer Research 50: 5102-5106 (1990); Santodonato, L., et al., Human Gene Therapy 7:1-10 (1996); Santodonato, L., et al., Gene Therapy 4:1246-1255 (1997); and Zhang, J.-F. et al., Cancer Gene Therapy 3: 31-38 (1996)), which are herein incorporated by reference. In one embodiment, the cells, which are engineered are arterial cells. The arterial cells may be reintroduced into the patient through direct injection to the artery, the tissues surrounding the artery, or through catheter injection.

[0443] As discussed in more detail below, the polynucleotide constructs can be delivered by any method that delivers injectable materials to the cells of an animal, such as, injection into the interstitial space of tissues (heart, muscle, skin, lung, liver, and the like). The polynucleotide constructs may be delivered in a pharmaceutically acceptable liquid or aqueous carrier.

[0444] In one embodiment, the polynucleotide of the present invention is delivered as a naked polynucleotide. The term “naked” polynucleotide, DNA or RNA refers to sequences that are free from any delivery vehicle that acts to assist, promote or facilitate entry into the cell, including viral sequences, viral particles, liposome formulations, lipofectin or precipitating agents and the like. However, the polynucleotide of the present invention can also be delivered in liposome formulations and lipofectin formulations and the like can be prepared by methods well known to those skilled in the art. Such methods are described, for example, in U.S. Pat. Nos. 5,593,972, 5,589,466, and 5,580,859, which are herein incorporated by reference.

[0445] The polynucleotide vector constructs used in the gene therapy method are preferably constructs that will not integrate into the host genome nor will they contain sequences that allow for replication. Appropriate vectors include pWLNEO, pSV2CAT, pOG44, pXT1 and pSG available from Stratagene; pSVK3, pBPV, pMSG and pSVL available from Pharmacia; and pEF1/V5, pcDNA3.1, and pRc/CMV2 available from Invitrogen. Other suitable vectors will be readily apparent to the skilled artisan.

[0446] Any strong promoter known to those skilled in the art can be used for driving the expression of the polynucleotide sequence. Suitable promoters include adenoviral promoters, such as the adenoviral major late promoter; or heterologous promoters, such as the cytomegalovirus (CMV) promoter; the respiratory syncytial virus (RSV) promoter; inducible promoters, such as the MMT promoter, the metallothionein promoter; heat shock promoters; the albumin promoter; the ApoAI promoter; human globin promoters; viral thymidine kinase promoters, such as the Herpes Simplex thymidine kinase promoter; retroviral LTRs; the b-actin promoter; and human growth hormone promoters. The promoter also may be the native promoter for the polynucleotide of the present invention.

[0447] Unlike other gene therapy techniques, one major advantage of introducing naked nucleic acid sequences into target cells is the transitory nature of the polynucleotide synthesis in the cells. Studies have shown that non-replicating DNA sequences can be introduced into cells to provide production of the desired polypeptide for periods of up to six months.

[0448] The polynucleotide construct can be delivered to the interstitial space of tissues within the an animal, including of muscle, skin, brain, lung, liver, spleen, bone marrow, thymus, heart, lymph, blood, bone, cartilage, pancreas, kidney, gall bladder, stomach, intestine, testis, ovary, uterus, rectum, nervous system, eye, gland, and connective tissue. Interstitial space of the tissues comprises, the intercellular, fluid, mucopolysaccharide matrix among the reticular fibers of organ tissues, elastic fibers in the walls of vessels or chambers, collagen fibers of fibrous tissues, or that same matrix within connective tissue ensheathing muscle cells or in the lacunae of bone. It is similarly the space occupied by the plasma of the circulation and the lymph fluid of the lymphatic channels. Delivery to the interstitial space of muscle tissue is preferred for the reasons discussed below. They may be conveniently delivered by injection into the tissues comprising these cells. They are preferably delivered to and expressed in persistent, non-dividing cells which are differentiated, although delivery and expression may be achieved in non-differentiated or less completely differentiated cells, such as, for example, stem cells of blood or skin fibroblasts. In vivo muscle cells are particularly competent in their ability to take up and express polynucleotides.

[0449] For the naked nucleic acid sequence injection, an effective dosage amount of DNA or RNA will be in the range of from about 0.05 mg/kg body weight to about 50 mg/kg body weight. Preferably the dosage will be from about 0.005 mg/kg to about 20 mg/kg and more preferably from about 0.05 mg/kg to about 5 mg/kg. Of course, as the artisan of ordinary skill will appreciate, this dosage will vary according to the tissue site of injection. The appropriate and effective dosage of nucleic acid sequence can readily be determined by those of ordinary skill in the art and may depend on the condition being treated and the route of administration.

[0450] The preferred route of administration is by the parenteral route of injection into the interstitial space of tissues. However, other parenteral routes may also be used, such as, inhalation of an aerosol formulation particularly for delivery to lungs or bronchial tissues, throat or mucous membranes of the nose. In addition, naked DNA constructs can be delivered to arteries during angioplasty by the catheter used in the procedure.

[0451] The naked polynucleotides are delivered by any method known in the art, including, but not limited to, direct needle injection at the delivery site, intravenous injection, topical administration, catheter infusion, and so-called “gene guns”. These delivery methods are known in the art.

[0452] The constructs may also be delivered with delivery vehicles such as viral sequences, viral particles, liposome formulations, lipofectin, precipitating agents, etc. Such methods of delivery are known in the art.

[0453] In certain embodiments, the polynucleotide constructs are complexed in a liposome preparation. Liposomal preparations for use in the instant invention include cationic (positively charged), anionic (negatively charged) and neutral preparations. However, cationic liposomes are particularly preferred because a tight charge complex can be formed between the cationic liposome and the polyanionic nucleic acid. Cationic liposomes have been shown to mediate intracellular delivery of plasmid DNA (Felgner et al., Proc. Natl. Acad. Sci. USA (1987) 84:7413-7416, which is herein incorporated by reference); mRNA (Malone et al., Proc. Natl. Acad. Sci. USA (1989) 86:6077-6081, which is herein incorporated by reference); and purified transcription factors (Debs et al., J. Biol. Chem. (1990) 265:10189-10192, which is herein incorporated by reference), in functional form.

[0454] Cationic liposomes are readily available. For example, N[1-2,3-dioleyloxy)propyl]-N,N,N-triethylammonium (DOTMA) lip osomes are particularly useful and are available under the trademark Lipofectin, from GIBCO BRL, Grand Island, N.Y., (see, also, Felgner et al., Proc. Natl Acad. Sci. USA (1987) 84:7413-7416, which is herein incorporated by reference). Other commercially available liposomes include transfectace (DDAB/DOPE) and DOTAP/DOPE (Boehringer).

[0455] Other cationic liposomes can be prepared from readily available materials using techniques well known in the art. See, e.g. PCT Publication No. WO 90/11092 (which is herein incorporated by reference) for a description of the synthesis of DOTAP (1,2-bis(oleoyloxy)-3-(trimethylammonio)propane) liposomes. Preparation of DOTMA liposomes is explained in the literature, see, e.g., P. Felgner et al., Proc. Natl. Acad. Sci. USA 84:7413-7417, which is herein incorporated by reference. Similar methods can be used to prepare liposomes from other cationic lipid materials.

[0456] Similarly, anionic and neutral liposomes are readily available, such as from Avanti Polar Lipids (Birmingham, Ala.), or can be easily prepared using readily available materials. Such materials include phosphatidyl choline, cholesterol, phosphatidyl ethanolamine, dioleoylphosphatidyl choline (DOPC), dioleoylphosphatidyl glycerol (DOPG), dioleoylphoshatidyl ethanolamine (DOPE), among others. These materials can also be mixed with the DOTMA and DOTAP starting materials in appropriate ratios. Methods for making liposomes using these materials are well known in the art.

[0457] For example, commercially dioleoylphosphatidyl choline (DOPC), dioleoylphosphatidyl glycerol (DOPG), and dioleoylphosphatidyl ethanolamine (DOPE) can be used in various combinations to make conventional liposomes, with or without the addition of cholesterol. Thus, for example, DOPG/DOPC vesicles can be prepared by drying 50 mg each of DOPG and DOPC under a stream of nitrogen gas into a sonication vial. The sample is placed under a vacuum pump overnight and is hydrated the following day with deionized water. The sample is then sonicated for 2 hours in a capped vial, using a Heat Systems model 350 sonicator equipped with an inverted cup (bath type) probe at the maximum setting while the bath is circulated at 15EC. Alternatively, negatively charged vesicles can be prepared without sonication to produce multilamellar vesicles or by extrusion through nucleopore membranes to produce unilamellar vesicles of discrete size. Other methods are known and available to those of skill in the art.

[0458] The liposomes can comprise multilamellar vesicles (MLVs), small unilamellar vesicles (SUVs), or large unilamellar vesicles (LUVs), with SUVs being preferred. The various liposome-nucleic acid complexes are prepared using methods well known in the art. See, e.g., Straubinger et al., Methods of Immunology (1983), 101:512-527, which is herein incorporated by reference. For example, MLVs containing nucleic acid can be prepared by depositing a thin film of phospholipid on the walls of a glass tube and subsequently hydrating with a solution of the material to be encapsulated. SUVs are prepared by extended sonication of MLVs to produce a homogeneous population of unilamellar liposomes. The material to be entrapped is added to a suspension of preformed MLVs and then sonicated. When using liposomes containing cationic lipids, the dried lipid film is resuspended in an appropriate solution such as sterile water or an isotonic buffer solution such as 10 mM Tris/NaCl, sonicated, and then the preformed liposomes are mixed directly with the DNA. The liposome and DNA form a very stable complex due to binding of the positively charged liposomes to the cationic DNA. SUVs find use with small nucleic acid fragments. LUVs are prepared by a number of methods, well known in the art. Commonly used methods include Ca²⁺-EDTA chelation (Papahadjopoulos et al., Biochim. Biophys. Acta (1975) 394:483; Wilson et al., Cell 17:77 (1979); ether injection (Deamer, D. and Bangham, A., Biochim. Biophys. Acta 443:629 (1976); Ostro et al., Biochem. Biophys. Res. Commun. 76:836 (1977); Fraley et al., Proc. Natl. Acad. Sci. USA 76:3348 (1979)); detergent dialysis (Enoch, H. and Strittmatter, P., Proc. Natl. Acad. Sci. USA 76:145 (1979)); and reverse-phase evaporation (REV) (Fraley et al., J. Biol. Chem. 255:10431 (1980); Szoka et al., Proc. Natl. Acad. Sci. USA 75:145 (1978); Schaefer-Ridder et al., Science 215:166 (1982)), which are herein incorporated by reference.

[0459] Generally, the ratio of DNA to liposomes will be from about 10:1 to about 1:10. Preferably, the ration will be from about 5:1 to about 1:5. More preferably, the ration will be about 3:1 to about 1:3. Still more preferably, the ratio will be about 1:1.

[0460] U.S. Pat. No. 5,676,954 (which is herein incorporated by reference) reports on the injection of genetic material, complexed with cationic liposomes carriers, into mice. U.S. Pat. Nos. 4,897,355, 4,946,787, 5,049,386, 5,459,127, 5,589,466, 5,693,622, 5,580,859, 5,703,055, and international publication no. WO 94/9469 (which are herein incorporated by reference) provide cationic lipids for use in transfecting DNA into cells and mammals. U.S. Pat. Nos. 5,589,466, 5,693,622, 5,580,859, 5,703,055, and International Publication No. WO 94/9469 provide methods for delivering DNA-cationic lipid complexes to mammals.

[0461] In certain embodiments, cells are engineered, ex vivo or in vivo, using a retroviral particle containing RNA, which comprises a sequence encoding a polypeptide of the present invention. Retroviruses from which the retroviral plasmid vectors may be derived include, but are not limited to, Moloney Murine Leukemia Virus, spleen necrosis virus, Rous sarcoma Virus, Harvey Sarcoma Virus, avian leukosis virus, gibbon ape leukemia virus, human immunodeficiency virus, Myeloproliferative Sarcoma Virus, and mammary tumor virus.

[0462] The retroviral plasmid vector is employed to transduce packaging cell lines to form producer cell lines. Examples of packaging cells which may be transfected include, but are not limited to, the PE501, PA317, R-2, R-AM, PA12, T19-14X, VT-19-17-H2, RCRE, RCRIP, GP+E-86, GP+envAm12, and DAN cell lines as described in Miller, Human Gene Therapy 1:5-14 (1990), which is incorporated herein by reference in its entirety. The vector may transduce the packaging cells through any means known in the art. Such means include, but are not limited to, electroporation, the use of liposomes, and CaPO₄ precipitation. In one alternative, the retroviral plasmid vector may be encapsulated into a liposome, or coupled to a lipid, and then administered to a host.

[0463] The producer cell line generates infectious retroviral vector particles, which include polynucleotide encoding a polypeptide of the present invention. Such retroviral vector particles then may be employed, to transduce eukaryotic cells, either in vitro or in vivo. The transduced eukaryotic cells will express a polypeptide of the present invention.

[0464] In certain other embodiments, cells are engineered, ex vivo or in vivo, with polynucleotide contained in an adenovirus vector. Adenovirus can be manipulated such that it encodes and expresses a polypeptide of the present invention, and at the same time is inactivated in terms of its ability to replicate in a normal lytic viral life cycle. Adenovirus expression is achieved without integration of the viral DNA into the host cell chromosome, thereby alleviating concerns about insertional mutagenesis. Furthermore, adenoviruses have been used as live enteric vaccines for many years with an excellent safety profile (Schwartz, et al., Am. Rev. Respir. Dis. 109:233-238 (1974)). Finally, adenovirus mediated gene transfer has been demonstrated in a number of instances including transfer of alpha-1-antitrypsin and CFTR to the lungs of cotton rats (Rosenfeld et al., Science 252:431-434 (1991); Rosenfeld et al., Cell 68:143-155 (1991)). Furthermore, extensive studies to attempt to establish adenovirus as a causative agent in human cancer were uniformly negative (Green et al., Proc. Natl. Acad. Sci. USA 76:6606 (1979)).

[0465] Suitable adenoviral vectors useful in the present invention are described, for example, in Kozarsky and Wilson, Curr. Opin. Genet. Devel. 3:499-503 (1993); Rosenfeld et al., Cell 68:143-155 (1992); Engelhardt et al., Human Genet. Ther. 4:759-769 (1993); Yang et al., Nature Genet. 7:362-369 (1994); Wilson et al., Nature 365:691-692 (1993); and U.S. Pat. No. 5,652,224, which are herein incorporated by reference. For example, the adenovirus vector Ad2 is useful and can be grown in human 293 cells. These cells contain the E1 region of adenovirus and constitutively express E1a and E1b, which complement the defective adenoviruses by providing the products of the genes deleted from the vector. In addition to Ad2, other varieties of adenovirus (e.g., Ad3, Ad5, and Ad7) are also useful in the present invention.

[0466] Preferably, the adenoviruses used in the present invention are replication deficient. Replication deficient adenoviruses require the aid of a helper virus and/or packaging cell line to form infectious particles. The resulting virus is capable of infecting cells and can express a polynucleotide of interest which is operably linked to a promoter, but cannot replicate in most cells. Replication deficient adenoviruses may be deleted in one or more of all or a portion of the following genes: E1a, E1b, E3, E4, E2a, or L1 through L5.

[0467] In certain other embodiments, the cells are engineered, ex vivo or in vivo, using an adeno-associated virus (AAV). AAVs are naturally occurring defective viruses that require helper viruses to produce infectious particles (Muzyczka, N., Curr. Topics in Microbiol. Immunol. 158:97 (1992)). It is also one of the few viruses that may integrate its DNA into non-dividing cells. Vectors containing as little as 300 base pairs of AAV can be packaged and can integrate, but space for exogenous DNA is limited to about 4.5 kb. Methods for producing and using such AAVs are known in the art. See, for example, U.S. Pat. Nos. 5,139,941, 5,173,414, 5,354,678, 5,436,146, 5,474,935, 5,478,745, and 5,589,377.

[0468] For example, an appropriate AAV vector for use in the present invention will include all the sequences necessary for DNA replication, encapsidation, and host-cell integration. The polynucleotide construct is inserted into the AAV vector using standard cloning methods, such as those found in Sambrook et al., Molecular Cloning: A Laboratory Manual, Cold Spring Harbor Press (1989). The recombinant AAV vector is then transfected into packaging cells which are infected with a helper virus, using any standard technique, including lipofection, electroporation, calcium phosphate precipitation, etc. Appropriate helper viruses include adenoviruses, cytomegaloviruses, vaccinia viruses, or herpes viruses. Once the packaging cells are transfected and infected, they will produce infectious AAV viral particles, which contain the polynucleotide construct. These viral particles are then used to transduce eukaryotic cells, either ex vivo or in vivo. The transduced cells will contain the polynucleotide construct integrated into its genome, and will express a polypeptide of the invention.

[0469] Another method of gene therapy involves operably associating heterologous control regions and endogenous lung antigen polynucleotide sequences (e.g., encoding a lung antigen polypeptide of the present invention) via homologous recombination (see, e.g., U.S. Pat. No. 5,641,670, issued Jun. 24, 1997; International Publication No. WO 96/29411, published Sep. 26, 1996; International Publication No. WO 94/12650, published Aug. 4, 1994; Koller et al., Proc. Natl. Acad. Sci. USA 86:8932-8935 (1989); and Zijlstra et al., Nature 342:435-438 (1989), which are herein incorporated by reference. This method involves the activation of a gene which is present in the target cells, but which is not normally expressed in the cells, or is expressed at a lower level than desired.

[0470] Polynucleotide constructs are made, using standard techniques known in the art, which contain the promoter with targeting sequences flanking the promoter. Suitable promoters are described herein. The targeting sequence is sufficiently complementary to an endogenous sequence to permit homologous recombination of the promoter-targeting sequence with the endogenous sequence. The targeting sequence will be sufficiently near the 5′ end of the desired endogenous polynucleotide sequence so the promoter will be operably linked to the endogenous sequence upon homologous recombination.

[0471] The promoter and the targeting sequences can be amplified using PCR. Preferably, the amplified promoter contains distinct restriction enzyme sites on the 5′ and 3′ ends. Preferably, the 3′ end of the first targeting sequence contains the same restriction enzyme site as the 5′ end of the amplified promoter and the 5′ end of the second targeting sequence contains the same restriction site as the 3′ end of the amplified promoter. The amplified promoter and targeting sequences are digested and ligated together.

[0472] The promoter-targeting sequence construct is delivered to the cells, either as naked polynucleotide, or in conjunction with transfection-facilitating agents, such as liposomes, viral sequences, viral particles, whole viruses, lipofection, precipitating agents, etc., described in more detail above. The P promoter-targeting sequence can be delivered by any method, included direct needle injection, intravenous injection, topical administration, catheter infusion, particle accelerators, etc. The methods are described in more detail below.

[0473] The promoter-targeting sequence construct is taken up by cells. Homologous recombination between the construct and the endogenous sequence takes place, such that an endogenous sequence is placed under the control of the promoter. The promoter then drives the expression of the endogenous sequence.

[0474] The polynucleotide encoding a polypeptide of the present invention may contain a secretory signal sequence that facilitates secretion of the protein. Typically, the signal sequence is positioned in the coding region of the polynucleotide to be expressed towards or at the 5′ end of the coding region. The signal sequence may be homologous or heterologous to the lung antigen polynucleotide of interest and may be homologous or heterologous to the cells to be transfected. Additionally, the signal sequence may be chemically synthesized using methods known in the art.

[0475] Any mode of administration of any of the above-described polynucleotides constructs can be used so long as the mode results in the expression of one or more molecules in an amount sufficient to provide a therapeutic effect. This includes direct needle injection, systemic injection, catheter infusion, biolistic injectors, particle accelerators (i.e., “gene guns”), gelfoam sponge depots, other commercially available depot materials, osmotic pumps (e.g., Alza minipumps), oral or suppositorial solid (tablet or pill) pharmaceutical formulations, and decanting or topical applications during surgery. For example, direct injection of naked calcium phosphate-precipitated plasmid into rat liver and rat spleen or a protein-coated plasmid into the portal vein has resulted in gene expression of the foreign gene in the rat livers (Kaneda et al., Science 243:375 (1989)).

[0476] A preferred method of local administration is by direct injection. Preferably, a recombinant molecule of the present invention complexed with a delivery vehicle is administered by direct injection into or locally within the area of arteries. Administration of a composition locally within the area of arteries refers to injecting the composition centimeters and preferably, millimeters within arteries.

[0477] Another method of local administration is to contact a polynucleotide construct of the present invention in or around a surgical wound. For example, a patient can undergo surgery and the polynucleotide construct can be coated on the surface of tissue inside the wound or the construct can be injected into areas of tissue inside the wound.

[0478] Therapeutic compositions useful in systemic administration, include recombinant molecules of the present invention complexed to a targeted delivery vehicle of the present invention. Suitable delivery vehicles for use with systemic administration comprise liposomes comprising ligands for targeting the vehicle to a particular site. In specific embodiments, suitable delivery vehicles for use with systemic administration comprise liposomes comprising polypeptides of the invention for targeting the vehicle to a particular site.

[0479] Preferred methods of systemic administration, include intravenous injection, aerosol, oral and percutaneous (topical) delivery. Intravenous injections can be performed using methods standard in the art. Aerosol delivery can also be performed using methods standard in the art (see, for example, Stribling et al., Proc. Natl. Acad. Sci. USA 189:11277-11281, 1992, which is incorporated herein by reference). Oral delivery can be performed by complexing a polynucleotide construct of the present invention to a carrier capable of withstanding degradation by digestive enzymes in the gut of an animal. Examples of such carriers, include plastic capsules or tablets, such as those known in the art. Topical delivery can be performed by mixing a polynucleotide construct of the present invention with a lipophilic reagent (e.g., DMSO) that is capable of passing into the skin.

[0480] Determining an effective amount of substance to be delivered can depend upon a number of factors including, for example, the chemical structure and biological activity of the substance, the age and weight of the animal, the precise condition requiring treatment and its severity, and the route of administration. The frequency of treatments depends upon a number of factors, such as the amount of polynucleotide constructs administered per dose, as well as the health and history of the subject. The precise amount, number of doses, and timing of doses will be determined by the attending physician or veterinarian.

[0481] Therapeutic compositions of the present invention can be administered to any animal, preferably to mammals and birds. Preferred mammals include humans, dogs, cats, mice, rats, rabbits sheep, cattle, horses and pigs, with humans being particularly preferred.

[0482] Biological Activities

[0483] Polynucleotides or polypeptides, or agonists or antagonists of the present invention, can be used in assays to test for one or more biological activities. If these polynucleotides or polypeptides, or agonists or antagonists of the present invention, do exhibit activity in a particular assay, it is likely that these molecules may be involved in the diseases associated with the biological activity. Thus, the polynucleotides and polypeptides, and agonists or antagonists could be used to treat, prevent diagnose and/or prognose the associated disease.

[0484] The lung antigen polynucleotides and polypeptides of the invention are predicted to have predominant expression in lung tissues.

[0485] Thus, the lung antigens of the invention may be useful as therapeutic molecules. Each would be useful for diagnosis, detection, treatment and/or prevention of diseases or disorders of the lung, including but not limited to allergic disorders (eosinophilic pneumonia, hypersensitivity pneumonitis (e.g., extrinsic allergic alveolitis, allergic interstitial pneumonitis, organic dust pneumoconiosis), asthma), pneumonia (e.g., bacterial, viral, fungal, atypical, and opportunistic infection), pleural disorders (e.g., pleurisy, pleural effusion, and pneumothorax), obstructive airway diseases (e.g., asthma, chronic obstructive pulmonary disease (COPD), emphysema, chronic or acute bronchitis), occupational lung diseases (e.g., silicosis, black lung, occupational asthsma, byssinosis, and benign pneumoconioses), Infiltrative Lung Disease (e.g., pulmonary fibrosis, idiopathic pulmonary fibrosis, and desquamative interstitial pneumonia), histiocytosis X, sarcoidosis and pulmonary alveolar proteinosis), Acute respiratory distress syndrome (also called, e.g., adult respiratory distress syndrome), edema, pulmonary embolism, bronchitis (e.g., viral, bacterial), bronchiectasis, atelectasis, lung abscess, cystic fibrosis, neoplasms and/or cancers of the lung, including, but not limited to, squamous cell carcinoma, small cell (oat cell) carcinoma, large cell carcinoma, and adenocarcinoma, and/or those disorders associated with the lung as described under “Respiratory Disorders” below.

[0486] In a preferred embodiment, polynucleotides of the invention (e.g., a nucleic acid sequence of SEQ ID NO:X or the complement thereof; or the cDNA sequence contained in Clone ID NO:Z, or fragments or variants thereof) and/or polypeptides of the invention (e.g., an amino acid sequence contained in SEQ ID NO:Y, an amino acid sequence encoded by SEQ ID NO:X, or the complement thereof, an amino acid sequence encoded by the cDNA sequence contained in Clone ID NO:Z and fragments or variants thereof as described herein) are useful for the diagnosis, detection, treatment, and/or prevention of diseases or disorders of the tissues/cells corresponding to the library source disclosed in column 7 of Table 1A expressing the corresponding lung sequence disclosed in the same row of Table 1A. In certain embodiments, a polypeptide of the invention, or polynucleotides, antibodies, agonists, or antagonists corresponding to that polypeptide, may be used to diagnose and/or prognose diseases and/or disorders associated with the tissue(s) in which the polypeptide of the invention is expressed, including one, two, three, four, five, or more tissues disclosed in Table 1A, column 7 (Tissue Distribution Library Code).

[0487] Particularly, the lung antigens may be a useful therapeutic for lung cancer. Treatment, diagnosis, detection, and/or prevention of lung disorders could be carried out using a lung antigen or soluble form of a lung antigen, a lung antigen ligand, gene therapy, or ex vivo applications. Moreover, inhibitors of a lung antigen, either blocking antibodies or mutant forms, could modulate the expression of the lung antigen. These inhibitors may be useful to treat, diagnose, detect, and/or prevent diseases associated with the misregulation of a lung antigen.

[0488] In one embodiment, the invention provides a method for the specific delivery of compositions of the invention to cells (e.g., normal or diseased lung cells) by administering polypeptides of the invention (e.g., lung antigen polypeptides or anti-lung antigen antibodies) that are associated with heterologous polypeptides or nucleic acids. In one example, the invention provides a method for delivering a therapeutic protein into the targeted cell (e.g., an aberrant lung cell or lung cancer cell). In another example, the invention provides a method for delivering a single stranded nucleic acid (e.g., antisense or ribozymes) or double stranded nucleic acid (e.g., DNA that can integrate into the cell's genome or replicate episomally and that can be transcribed) into the targeted cell.

[0489] In another embodiment, the invention provides a method for the specific destruction of cells (e.g., the destruction of aberrant lung cells, including, but not limited to, lung tumor cells) by administering polypeptides of the invention (e.g., lung antigen polypeptides or fragments thereof, or anti-lung antigen antibodies) in association with toxins or cytotoxic prodrugs.

[0490] By “toxin” is meant compounds that bind and activate endogenous cytotoxic effector systems, radioisotopes, holotoxins, modified toxins, catalytic subunits of toxins, cytotoxins (cytotoxic agents), or any molecules or enzymes not normally present in or on the surface of a cell that under defined conditions cause the cell's death. Toxins that may be used according to the methods of the invention include, but are not limited to, radioisotopes known in the art, compounds such as, for example, antibodies (or complement fixing containing portions thereof) that bind an inherent or induced endogenous cytotoxic effector system, thymidine kinase, endonuclease, RNAse, alpha toxin, ricin, abrin, Pseudomonas exotoxin A, diphtheria toxin, saporin, momordin, gelonin, pokeweed antiviral protein, alpha-sarcin and cholera toxin. “Toxin” also includes a cytostatic or cytocidal agent, a therapeutic agent or a radioactive metal ion, e.g., alpha-emitters such as, for example, ²¹³Bi, or other radioisotopes such as, for example, ¹⁰³Pd, ¹³³Xe, ¹³¹I, ⁶⁸Ge, ⁵⁷Co, ⁶⁵Zn, ⁸⁵Sr, ³²P, ³⁵S, ⁹⁰Y, ¹⁵³Sm, ¹⁵³Gd, ¹⁶⁹Yb, ⁵¹Cr, ⁵⁴Mn, ⁷⁵Se, ¹¹³Sp, ⁹⁰Yttrium, ¹¹⁷Tin, ¹⁸⁶Rhenium, ¹⁶⁶Holmium, and ¹⁸⁸Rhenium; luminescent labels, such as luminol; and fluorescent labels, such as fluorescein and rhodamine, and biotin.

[0491] Techniques known in the art may be applied to label antibodies of the invention. Such techniques include, but are not limited to, the use of bifunctional conjugating agents (see e.g., U.S. Pat. Nos. 5,756,065; 5,714,631; 5,696,239; 5,652,361; 5,505,931; 5,489,425; 5,435,990; 5,428,139; 5,342,604; 5,274,119; 4,994,560; and 5,808,003; the contents of each of which are hereby incorporated by reference in its entirety). A cytotoxin or cytotoxic agent includes any agent that is detrimental to cells. Examples include paclitaxol, cytochalasin B, gramicidin D, ethidium bromide, emetine, mitomycin, etoposide, tenoposide, vincristine, vinblastine, colchicin, doxorubicin, daunorubicin, dihydroxy anthracin dione, mitoxantrone, mithramycin, actinomycin D, 1-dehydrotestosterone, glucocorticoids, procaine, tetracaine, lidocaine, propranolol, and puromycin and analogs or homologs thereof. Therapeutic agents include, but are not limited to, antimetabolites (e.g., methotrexate, 6-mercaptopurine, 6-thioguanine, cytarabine, 5-fluorouracil decarbazine), alkylating agents (e.g., mechlorethamine, thioepa chlorambucil, melphalan, carmnustine (BSNU) and lomustine (CCNU), cyclothosphamide, busulfan, dibromomannitol, streptozotocin, mitomycin C, and cis-dichlorodiamine platinum (II) (DDP) cisplatin), anthracyclines (e.g., daunorubicin (formerly daunomycin) and doxorubicin), antibiotics (e.g., dactinomycin (formerly actinomycin), bleomycin, mithramycin, and anthramycin (AMC)), and anti-mitotic agents (e.g., vincristine and vinblastine).

[0492] By “cytotoxic prodrug” is meant a non-toxic compound that is converted by an enzyme, normally present in the cell, into a cytotoxic compound. Cytotoxic prodrugs that may be used according to the methods of the invention include, but are not limited to, glutamyl derivatives of benzoic acid mustard alkylating agent, phosphate derivatives of etoposide or mitomycin C, cytosine arabinoside, daunorubisin, and phenoxyacetamide derivatives of doxorubicin.

[0493] It will be appreciated that conditions caused by a decrease in the standard or normal level of a lung antigen activity in an individual, particularly disorders of the lung, can be treated by administration of a lung antigen polypeptide (e.g., such as, for example, the complete lung antigen polypeptide, the soluble form of the extracellular domain of a lung antigen polypeptide, or cells expressing the complete protein) or agonist. Thus, the invention also provides a method of treatment of an individual in need of an increased level of lung antigen activity comprising administering to such an individual a pharmaceutical composition comprising an amount of an isolated lung antigen polypeptide of the invention, or agonist thereof (e.g., an agonistic anti-lung antigen antibody), effective to increase the lung antigen activity level in such an individual.

[0494] It will also be appreciated that conditions caused by a increase in the standard or normal level of lung antigen activity in an individual, particularly disorders of the lung, can be treated by administration of lung antigen polypeptides (e.g., such as, for example, the complete lung antigen polypeptide, the soluble form of the extracellular domain of a lung antigen polypeptide, or cells expressing the complete protein) or antagonist (e.g., an antagonistic lung antigen antibody). Thus, the invention also provides a method of treatment of an individual in need of an decreased level of lung antigen activity comprising administering to such an individual a pharmaceutical composition comprising an amount of an isolated lung antigen polypeptide of the invention, or antagonist thereof (e.g., an antagonistic anti-lung antigen antibody), effective to decrease the lung antigen activity level in such an individual.

[0495] More generally, polynucleotides, translation products and antibodies corresponding to this gene may be useful for the diagnosis, prognosis, prevention, and/or treatment of diseases and/or disorders associated with the following systems.

[0496] Respiratory Disorders

[0497] Polynucleotides or polypeptides, or agonists or antagonists of the present invention may be used to treat, prevent, diagnose, and/or prognose diseases and/or disorders of the respiratory system.

[0498] Diseases and disorders of the respiratory system include, but are not limited to, nasal vestibulitis, nonallergic rhinitis (e.g., acute rhinitis, chronic rhinitis, atrophic rhinitis, vasomotor rhinitis), nasal polyps, and sinusitis, juvenile angiofibromas, cancer of the nose and juvenile papillomas, vocal cord polyps, nodules (singer's nodules), contact ulcers, vocal cord paralysis, laryngoceles, pharyngitis (e.g., viral and bacterial), tonsillitis, tonsillar cellulitis, parapharyngeal abscess, laryngitis, laryngoceles, and throat cancers (e.g., cancer of the nasopharynx, tonsil cancer, larynx cancer), lung cancer (e.g., squamous cell carcinoma, small cell (oat cell) carcinoma, large cell carcinoma, and adenocarcinoma), allergic disorders (eosinophilic pneumonia, hypersensitivity pneumonitis (e.g., extrinsic allergic alveolitis, allergic interstitial pneumonitis, organic dust pneumoconiosis, allergic bronchopulmonary aspergillosis, asthma, Wegener's granulomatosis (granulomatous vasculitis), Goodpasture's syndrome)), pneumonia (e.g., bacterial pneumonia (e.g., Streptococcus pneumoniae (pneumoncoccal pneumonia), Staphylococcus aureus (staphylococcal pneumonia), Gram-negative bacterial pneumonia (caused by, e.g., Klebsiella and Pseudomas spp.), Mycoplasma pneumoniae pneumonia, Hemophilus influenzae pneumonia, Legionella pneumophila (Legionnaires' disease), and Chlamydia psittaci (Psittacosis)), and viral pneumonia (e.g., influenza, chickenpox (varicella).

[0499] Additional diseases and disorders of the respiratory system include, but are not limited to bronchiolitis, polio (poliomyelitis), croup, respiratory syneytial viral infection, mumps, erythema infectiosum (fifth disease), roseola infantum, progressive rubella panencephalitis, german measles, and subacute sclerosing panencephalitis), fungal pneumonia (e.g., Histoplasmosis, Coccidioidomycosis, Blastomycosis, fungal infections in people with severely suppressed immune systems (e.g., cryptococcosis, caused by Cryptococcus neoformans; aspergillosis, caused by Aspergillus spp.; candidiasis, caused by Candida; and mucormycosis)), Pneumocystis carinii (pneumocystis pneumonia), atypical pneumonias (e.g., Mycoplasma and Chlamydia spp.), opportunistic infection pneumonia, nosocomial pneumonia, chemical pneumonitis, and aspiration pneumonia, pleural disorders (e.g., pleurisy, pleural effusion, and pneumothorax (e.g., simple spontaneous pneumothorax, complicated spontaneous pneumothorax, tension pneumothorax)), obstructive airway diseases (e.g., asthma, chronic obstructive pulmonary disease (COPD), emphysema, chronic or acute bronchitis), occupational lung diseases (e.g., silicosis, black lung (coal workers' pneumoconiosis), asbestosis, berylliosis, occupational asthsma, byssinosis, and benign pneumoconioses), Infiltrative Lung Disease (e.g., pulmonary fibrosis (e.g., fibrosing alveolitis, usual interstitial pneumonia), idiopathic pulmonary fibrosis, desquamative interstitial pneumonia, lymphoid interstitial pneumonia, histiocytosis X (e.g., Letterer-Siwe disease, Hand-Schüller-Christian disease, eosinophilic granuloma), idiopathic pulmonary hemosiderosis, sarcoidosis and pulmonary alveolar proteinosis), Acute respiratory distress syndrome (also called, e.g., adult respiratory distress syndrome), edema, pulmonary embolism, bronchitis (e.g., viral, bacterial), bronchiectasis, atelectasis, lung abscess (caused by, e.g., Staphylococcus aureus or Legionella pneumophila), and cystic fibrosis.

[0500] Immune Activity

[0501] Polynucleotides, polypeptides, antibodies, and/or agonists or antagonists of the present invention may be useful in treating, preventing, diagnosing and/or prognosing diseases, disorders, and/or conditions of the immune system, by, for example, activating or inhibiting the proliferation, differentiation, or mobilization (chemotaxis) of immune cells. Immune cells develop through a process called hematopoiesis, producing myeloid (platelets, red blood cells, neutrophils, and macrophages) and lymphoid (B and T lymphocytes) cells from pluripotent stem cells. The etiology of these immune diseases, disorders, and/or conditions may be genetic, somatic, such as cancer and some autoimmune diseases, acquired (e.g., by chemotherapy or toxins), or infectious. Moreover, polynucleotides, polypeptides, antibodies, and/or agonists or antagonists of the present invention can be used as a marker or detector of a particular immune system disease or disorder.

[0502] In another embodiment, a polypeptide of the invention, or polynucleotides, antibodies, agonists, or antagonists corresponding to that polypeptide, may be used to treat diseases and disorders of the immune system and/or to inhibit or enhance an immune response generated by cells associated with the tissue(s) in which the polypeptide of the invention is expressed, including one, two, three, four, five, or more tissues disclosed in Table 1A, column 7 (Tissue Distribution Library Code).

[0503] Polynucleotides, polypeptides, antibodies, and/or agonists or antagonists of the present invention may be useful in treating, preventing, diagnosing, and/or prognosing immunodeficiencies, including both congenital and acquired immunodeficiencies. Examples of B cell immunodeficiencies in which immunoglobulin levels B cell function and/or B cell numbers are decreased include: X-linked agammaglobulinemia (Bruton's disease), X-linked infantile agammaglobulinemia, X-linked immunodeficiency with hyper IgM, non X-linked immunodeficiency with hyper IgM, X-linked lymphoproliferative syndrome (XLP), agammaglobulinemia including congenital and acquired agammaglobulinemia, adult onset agammaglobulinemia, late-onset agammaglobulinemia, dysgammaglobulinemia, hypogammaglobulinemia, unspecified hypogammaglobulinemia, recessive agammaglobulinemia (Swiss type), Selective IgM deficiency, selective IgA deficiency, selective IgG subclass deficiencies, IgG subclass deficiency (with or without IgA deficiency), Ig deficiency with increased IgM, IgG and IgA deficiency with increased IgM, antibody deficiency with normal or elevated Igs, Ig heavy chain deletions, kappa chain deficiency, B cell lymphoproliferative disorder (BLPD), common variable immunodeficiency (CVID), common variable immunodeficiency (CVI) (acquired), and transient hypogammaglobulinemia of infancy.

[0504] In specific embodiments, ataxia-telangiectasia or conditions associated with ataxia-telangiectasia are treated, prevented, diagnosed, and/or prognosing using the polypeptides or polynucleotides of the invention, and/or agonists or antagonists thereof.

[0505] Examples of congenital immunodeficiencies in which T cell and/or B cell function and/or number is decreased include, but are not limited to: DiGeorge anomaly, severe combined immunodeficiencies (SCID) (including, but not limited to, X-linked SCID, autosomal recessive SCID, adenosine deaminase deficiency, purine nucleoside phosphorylase (PNP) deficiency, Class II MHC deficiency (Bare lymphocyte syndrome), Wiskott-Aldrich syndrome, and ataxia telangiectasia), thymic hypoplasia, third and fourth pharyngeal pouch syndrome, 22q11.2 deletion, chronic mucocutaneous candidiasis, natural killer cell deficiency (NK), idiopathic CD4+ T-lymphocytopenia, immunodeficiency with predominant T cell defect (unspecified), and unspecified immunodeficiency of cell mediated immunity.

[0506] In specific embodiments, DiGeorge anomaly or conditions associated with DiGeorge anomaly are treated, prevented, diagnosed, and/or prognosed using polypeptides or polynucleotides of the invention, or antagonists or agonists thereof.

[0507] Other immunodeficiencies that may be treated, prevented, diagnosed, and/or prognosed using polypeptides or polynucleotides of the invention, and/or agonists or antagonists thereof, include, but are not limited to, chronic granulomatous disease, Chédiak-Higashi syndrome, myeloperoxidase deficiency, leukocyte glucose-6-phosphate dehydrogenase deficiency, X-linked lymphoproliferative syndrome (XLP), leukocyte adhesion deficiency, complement component deficiencies (including C1, C2, C3, C4, C5, C6, C7, C8 and/or C9 deficiencies), reticular dysgenesis, thymic alymphoplasia-aplasia, immunodeficiency with thymoma, severe congenital leukopenia, dysplasia with immunodeficiency, neonatal neutropenia, short limbed dwarfism, and Nezelof syndrome-combined immunodeficiency with Igs.

[0508] In a preferred embodiment, the immunodeficiencies and/or conditions associated with the immunodeficiencies recited above are treated, prevented, diagnosed and/or prognosed using polynucleotides, polypeptides, antibodies, and/or agonists or antagonists of the present invention.

[0509] In a preferred embodiment polynucleotides, polypeptides, antibodies, and/or agonists or antagonists of the present invention could be used as an agent to boost immunoresponsiveness among immunodeficient individuals. In specific embodiments, polynucleotides, polypeptides, antibodies, and/or agonists or antagonists of the present invention could be used as an agent to boost immunoresponsiveness among B cell and/or T cell immunodeficient individuals.

[0510] The polynucleotides, polypeptides, antibodies, and/or agonists or antagonists of the present invention may be useful in treating, preventing, diagnosing and/or prognosing autoimmune disorders. Many autoimmune disorders result from inappropriate recognition of self as foreign material by immune cells. This inappropriate recognition results in an immune response leading to the destruction of the host tissue. Therefore, the administration of polynucleotides and polypeptides of the invention that can inhibit an immune response, particularly the proliferation, differentiation, or chemotaxis of T-cells, may be an effective therapy in preventing autoimmune disorders.

[0511] Autoimmune diseases or disorders that may be treated, prevented, diagnosed and/or prognosed by polynucleotides, polypeptides, antibodies, and/or agonists or antagonists of the present invention include, but are not limited to, one or more of the following: systemic lupus erythematosus, rheumatoid arthritis, ankylosing spondylitis, multiple sclerosis, autoimmune thyroiditis, Hashimoto's thyroiditis, autoimmune hemolytic anemia, hemolytic anemia, thrombocytopenia, autoimmune thrombocytopenia purpura, autoimmune neonatal thrombocytopenia, idiopathic thrombocytopenia purpura, purpura (e.g., Henloch-Scoenlein purpura), autoimmunocytopenia, Goodpasture's syndrome, Pemphigus vulgaris, myasthenia gravis, Grave's disease (hyperthyroidism), and insulin-resistant diabetes mellitus.

[0512] Additional disorders that are likely to have an autoimmune component that may be treated, prevented, and/or diagnosed with the compositions of the invention include, but are not limited to, type II collagen-induced arthritis, antiphospholipid syndrome, dermatitis, allergic encephalomyelitis, myocarditis, relapsing polychondritis, rheumatic heart disease, neuritis, uveitis ophthalmia, polyendocrinopathies, Reiter's Disease, Stiff-Man Syndrome, autoimmune pulmonary inflammation, autism, Guillain-Barre Syndrome, insulin dependent diabetes mellitus, and autoimmune inflammatory eye disorders.

[0513] Additional disorders that are likely to have an autoimmune component that may be treated, prevented, diagnosed and/or prognosed with the compositions of the invention include, but are not limited to, scleroderma with anti-collagen antibodies (often characterized, e.g., by nucleolar and other nuclear antibodies), mixed connective tissue disease (often characterized, e.g., by antibodies to extractable nuclear antigens (e.g., ribonucleoprotein)), polymyositis (often characterized, e.g., by nonhistone ANA), pernicious anemia (often characterized, e.g., by antiparietal cell, microsomes, and intrinsic factor antibodies), idiopathic Addison's disease (often characterized, e.g., by humoral and cell-mediated adrenal cytotoxicity, infertility (often characterized, e.g., by antispermatozoal antibodies), glomerulonephritis (often characterized, e.g., by glomerular basement membrane antibodies or immune complexes), bullous pemphigoid (often characterized, e.g., by IgG and complement in basement membrane), Sjogren's syndrome (often characterized, e.g., by multiple tissue antibodies, and/or a specific nonhistone ANA (SS-B)), diabetes mellitus (often characterized, e.g., by cell-mediated and humoral islet cell antibodies), and adrenergic drug resistance (including adrenergic drug resistance with asthma or cystic fibrosis) (often characterized, e.g., by beta-adrenergic receptor antibodies).

[0514] Additional disorders that may have an autoimmune component that may be treated, prevented, diagnosed and/or prognosed with the compositions of the invention include, but are not limited to, chronic active hepatitis (often characterized, e.g., by smooth muscle antibodies), primary biliary cirrhosis (often characterized, e.g., by mitochondria antibodies), other endocrine gland failure (often characterized, e.g., by specific tissue antibodies in some cases), vitiligo (often characterized, e.g., by melanocyte antibodies), vasculitis (often characterized, e.g., by Ig and complement in vessel walls and/or low serum complement), post-MI (often characterized, e.g., by myocardial antibodies), cardiotomy syndrome (often characterized, e.g., by myocardial antibodies), urticaria (often characterized, e.g., by IgG and IgM antibodies to IgE), atopic dermatitis (often characterized, e.g., by IgG and IgM antibodies to IgE), asthma (often characterized, e.g., by IgG and IgM antibodies to IgE), and many other inflammatory, granulomatous, degenerative, and atrophic disorders.

[0515] In a preferred embodiment, the autoimmune diseases and disorders and/or conditions associated with the diseases and disorders recited above are treated, prevented, diagnosed and/or prognosed using for example, antagonists or agonists, polypeptides or polynucleotides, or antibodies of the present invention. In a specific preferred embodiment, rheumatoid arthritis is treated, prevented, and/or diagnosed using polynucleotides, polypeptides, antibodies, and/or agonists or antagonists of the present invention.

[0516] In another specific preferred embodiment, systemic lupus erythematosus is treated, prevented, and/or diagnosed using polynucleotides, polypeptides, antibodies, and/or agonists or antagonists of the present invention. In another specific preferred embodiment, idiopathic thrombocytopenia purpura is treated, prevented, and/or diagnosed using polynucleotides, polypeptides, antibodies, and/or agonists or antagonists of the present invention.

[0517] In another specific preferred embodiment IgA nephropathy is treated, prevented, and/or diagnosed using polynucleotides, polypeptides, antibodies, and/or agonists or antagonists of the present invention.

[0518] In a preferred embodiment, the autoimmune diseases and disorders and/or conditions associated with the diseases and disorders recited above are treated, prevented, diagnosed and/or prognosed using polynucleotides, polypeptides, antibodies, and/or agonists or antagonists of the present invention.

[0519] In preferred embodiments, polypeptides, antibodies, polynucleotides and/or agonists or antagonists of the present invention are used as a immunosuppressive agent(s).

[0520] Polynucleotides, polypeptides, antibodies, and/or agonists or antagonists of the present invention may be useful in treating, preventing, prognosing, and/or diagnosing diseases, disorders, and/or conditions of hematopoietic cells. Polynucleotides, polypeptides, antibodies, and/or agonists or antagonists of the present invention could be used to increase differentiation and proliferation of hematopoietic cells, including the pluripotent stem cells, in an effort to treat or prevent those diseases, disorders, and/or conditions associated with a decrease in certain (or many) types hematopoietic cells, including but not limited to, leukopenia, neutropenia, anemia, and thrombocytopenia. Alternatively, Polynucleotides, polypeptides, antibodies, and/or agonists or antagonists of the present invention could be used to increase differentiation and proliferation of hematopoietic cells, including the pluripotent stem cells, in an effort to treat or prevent those diseases, disorders, and/or conditions associated with an increase in certain (or many) types of hematopoietic cells, including but not limited to, histiocytosis.

[0521] Allergic reactions and conditions, such as asthma (particularly allergic asthma) or other respiratory problems, may also be treated, prevented, diagnosed and/or prognosed using polypeptides, antibodies, or polynucleotides of the invention, and/or agonists or antagonists thereof. Moreover, these molecules can be used to treat, prevent, prognose, and/or diagnose anaphylaxis, hypersensitivity to an antigenic molecule, or blood group incompatibility.

[0522] Additionally, polypeptides or polynucleotides of the invention, and/or agonists or antagonists thereof, may be used to treat, prevent, diagnose and/or prognose IgE-mediated allergic reactions. Such allergic reactions include, but are not limited to, asthma, rhinitis, and eczema. In specific embodiments, polynucleotides, polypeptides, antibodies, and/or agonists or antagonists of the present invention may be used to modulate IgE concentrations in vitro or in vivo.

[0523] Moreover, polynucleotides, polypeptides, antibodies, and/or agonists or antagonists of the present invention have uses in the diagnosis, prognosis, prevention, and/or treatment of inflammatory conditions. For example, since polypeptides, antibodies, or polynucleotides of the invention, and/or agonists or antagonists of the invention may inhibit the activation, proliferation and/or differentiation of cells involved in an inflammatory response, these molecules can be used to prevent and/or treat chronic and acute inflammatory conditions. Such inflammatory conditions include, but are not limited to, for example, inflammation associated with infection (e.g., septic shock, sepsis, or systemic inflammatory response syndrome), ischemia-reperfusion injury, endotoxin lethality, complement-mediated hyperacute rejection, nephritis, cytokine or chemokine induced lung injury, inflammatory bowel disease, Crohn's disease, over production of cytokines (e.g., TNF or IL-1.), respiratory disorders (e.g., asthma and allergy); gastrointestinal disorders (e.g., inflammatory bowel disease); cancers (e.g., gastric, ovarian, lung, bladder, liver, and breast); CNS disorders (e.g., multiple sclerosis; ischemic brain injury and/or stroke, traumatic brain injury, neurodegenerative disorders (e.g., Parkinson's disease and Alzheimer's disease); AIDS-related dementia; and prion disease); cardiovascular disorders (e.g., atherosclerosis, myocarditis, cardiovascular disease, and cardiopulmonary bypass complications); as well as many additional diseases, conditions, and disorders that are characterized by inflammation (e.g., hepatitis, rheumatoid arthritis, gout, trauma, pancreatitis, sarcoidosis, dermatitis, renal ischemia-reperfusion injury, Grave's disease, systemic lupus erythematosus, diabetes mellitus, and allogenic transplant rejection).

[0524] Because inflammation is a fundamental defense mechanism, inflammatory disorders can effect virtually any tissue of the body. Accordingly, polynucleotides, polypeptides, and antibodies of the invention, as well as agonists or antagonists thereof, have uses in the treatment of tissue-specific inflammatory disorders, including, but not limited to, adrenalitis, alveolitis, angiocholecystitis, appendicitis, balanitis, blepharitis, bronchitis, bursitis, carditis, cellulitis, cervicitis, cholecystitis, chorditis, cochlitis, colitis, conjunctivitis, cystitis, dermatitis, diverticulitis, encephalitis, endocarditis, esophagitis, eustachitis, fibrositis, folliculitis, gastritis, gastroenteritis, gingivitis, glossitis, hepatosplenitis, keratitis, labyrinthitis, laryngitis, lymphangitis, mastitis, media otitis, meningitis, metritis, mucitis, myocarditis, myosititis, myringitis, nephritis, neuritis, orchitis, osteochondritis, otitis, pericarditis, peritendonitis, peritonitis, pharyngitis, phlebitis, poliomyelitis, prostatitis, pulpitis, retinitis, rhinitis, salpingitis, scleritis, sclerochoroiditis, scrotitis, sinusitis, spondylitis, steatitis, stomatitis, synovitis, syringitis, tendonitis, tonsillitis, urethritis, and vaginitis.

[0525] In specific embodiments, polypeptides, antibodies, or polynucleotides of the invention, and/or agonists or antagonists thereof, are useful to diagnose, prognose, prevent, and/or treat organ transplant rejections and graft-versus-host disease. Organ rejection occurs by host immune cell destruction of the transplanted tissue through an immune response. Similarly, an immune response is also involved in GVHD, but, in this case, the foreign transplanted immune cells destroy the host tissues. Polypeptides, antibodies, or polynucleotides of the invention, and/or agonists or antagonists thereof, that inhibit an immune response, particularly the activation, proliferation, differentiation, or chemotaxis of T-cells, may be an effective therapy in preventing organ rejection or GVHD. In specific embodiments, polypeptides, antibodies, or polynucleotides of the invention, and/or agonists or antagonists thereof, that inhibit an immune response, particularly the activation, proliferation, differentiation, or chemotaxis of T-cells, may be an effective therapy in preventing experimental allergic and hyperacute xenograft rejection.

[0526] In other embodiments, polypeptides, antibodies, or polynucleotides of the invention, and/or agonists or antagonists thereof, are useful to diagnose, prognose, prevent, and/or treat immune complex diseases, including, but not limited to, serum sickness, post streptococcal glomerulonephritis, polyarteritis nodosa, and immune complex-induced vasculitis.

[0527] Polypeptides, antibodies, polynucleotides and/or agonists or antagonists of the invention can be used to treat, detect, and/or prevent infectious agents. For example, by increasing the immune response, particularly increasing the proliferation activation and/or differentiation of B and/or T cells, infectious diseases may be treated, detected, and/or prevented. The immune response may be increased by either enhancing an existing immune response, or by initiating a new immune response. Alternatively, polynucleotides, polypeptides, antibodies, and/or agonists or antagonists of the present invention may also directly inhibit the infectious agent (refer to section of application listing infectious agents, etc), without necessarily eliciting an immune response.

[0528] In another embodiment, polypeptides, antibodies, polynucleotides and/or agonists or antagonists of the present invention are used as a vaccine adjuvant that enhances immune responsiveness to an antigen. In a specific embodiment, polypeptides, antibodies, polynucleotides and/or agonists or antagonists of the present invention are used as an adjuvant to enhance tumor-specific immune responses.

[0529] In another specific embodiment, polypeptides, antibodies, polynucleotides and/or agonists or antagonists of the present invention are used as an adjuvant to enhance anti-viral immune responses. Anti-viral immune responses that may be enhanced using the compositions of the invention as an adjuvant, include virus and virus associated diseases or symptoms described herein or otherwise known in the art. In specific embodiments, the compositions of the invention are used as an adjuvant to enhance an immune response to a virus, disease, or symptom selected from the group consisting of: AIDS, meningitis, Dengue, EBV, and hepatitis (e.g., hepatitis B). In another specific embodiment, the compositions of the invention are used as an adjuvant to enhance an immune response to a virus, disease, or symptom selected from the group consisting of: HIV/AIDS, respiratory syncytial virus, Dengue, rotavirus, Japanese B encephalitis, influenza A and B, parainfluenza, measles, cytomegalovirus, rabies, Junin, Chikungunya, Rift Valley Fever, herpes simplex, and yellow fever.

[0530] In another specific embodiment, polypeptides, antibodies, polynucleotides and/or agonists or antagonists of the present invention are used as an adjuvant to enhance anti-bacterial or anti-fungal immune responses. Anti-bacterial or anti-fungal immune responses that may be enhanced using the compositions of the invention as an adjuvant, include bacteria or fungus and bacteria or fungus associated diseases or symptoms described herein or otherwise known in the art. In specific embodiments, the compositions of the invention are used as an adjuvant to enhance an immune response to a bacteria or fungus, disease, or symptom selected from the group consisting of: tetanus, Diphtheria, botulism, and meningitis type B.

[0531] In another specific embodiment, the compositions of the invention are used as an adjuvant to enhance an immune response to a bacteria or fungus, disease, or symptom selected from the group consisting of: Vibrio cholerae, Mycobacterium leprae, Salmonella typhi, Salmonella paratyphi, Meisseria meningitidis, Streptococcus pneumoniae, Group B streptococcus, Shigella spp., Enterotoxigenic Escherichia coli, Enterohemorrhagic E. coli, and Borrelia burgdorferi.

[0532] In another specific embodiment, polypeptides, antibodies, polynucleotides and/or agonists or antagonists of the present invention are used as an adjuvant to enhance anti-parasitic immune responses. Anti-parasitic immune responses that may be enhanced using the compositions of the invention as an adjuvant, include parasite and parasite associated diseases or symptoms described herein or otherwise known in the art. In specific embodiments, the compositions of the invention are used as an adjuvant to enhance an immune response to a parasite. In another specific embodiment, the compositions of the invention are used as an adjuvant to enhance an immune response to Plasmodium (malaria) or Leishmania.

[0533] In another specific embodiment, polypeptides, antibodies, polynucleotides and/or agonists or antagonists of the present invention may also be employed to treat infectious diseases including silicosis, sarcoidosis, and idiopathic pulmonary fibrosis; for example, by preventing the recruitment and activation of mononuclear phagocytes.

[0534] In another specific embodiment, polypeptides, antibodies, polynucleotides and/or agonists or antagonists of the present invention are used as an antigen for the generation of antibodies to inhibit or enhance immune mediated responses against polypeptides of the invention.

[0535] In one embodiment, polypeptides, antibodies, polynucleotides and/or agonists or antagonists of the present invention are administered to an animal (e.g., mouse, rat, rabbit, hamster, guinea pig, pigs, micro-pig, chicken, camel, goat, horse, cow, sheep, dog, cat, non-human primate, and human, most preferably human) to boost the immune system to produce increased quantities of one or more antibodies (e.g., IgG, IgA, IgM, and IgE), to induce higher affinity antibody production and immunoglobulin class switching (e.g., IgG, IgA, IgM, and IgE), and/or to increase an immune response.

[0536] In another specific embodiment, polypeptides, antibodies, polynucleotides and/or agonists or antagonists of the present invention are used as a stimulator of B cell responsiveness to pathogens.

[0537] In another specific embodiment, polypeptides, antibodies, polynucleotides and/or agonists or antagonists of the present invention are used as an activator of T cells.

[0538] In another specific embodiment, polypeptides, antibodies, polynucleotides and/or agonists or antagonists of the present invention are used as an agent that elevates the immune status of an individual prior to their receipt of immunosuppressive therapies.

[0539] In another specific embodiment, polypeptides, antibodies, polynucleotides and/or agonists or antagonists of the present invention are used as an agent to induce higher affinity antibodies.

[0540] In another specific embodiment, polypeptides, antibodies, polynucleotides and/or agonists or antagonists of the present invention are used as an agent to increase serum immunoglobulin concentrations.

[0541] In another specific embodiment, polypeptides, antibodies, polynucleotides and/or agonists or antagonists of the present invention are used as an agent to accelerate recovery of immunocompromised individuals.

[0542] In another specific embodiment, polypeptides, antibodies, polynucleotides and/or agonists or antagonists of the present invention are used as an agent to boost immunoresponsiveness among aged populations and/or neonates.

[0543] In another specific embodiment, polypeptides, antibodies, polynucleotides and/or agonists or antagonists of the present invention are used as an immune system enhancer prior to, during, or after bone marrow transplant and/or other transplants (e.g., allogeneic or xenogeneic organ transplantation). With respect to transplantation, compositions of the invention may be administered prior to, concomitant with, and/or after transplantation. In a specific embodiment, compositions of the invention are administered after transplantation, prior to the beginning of recovery of T-cell populations. In another specific embodiment, compositions of the invention are first administered after transplantation after the beginning of recovery of T cell populations, but prior to full recovery of B cell populations.

[0544] In another specific embodiment, polypeptides, antibodies, polynucleotides and/or agonists or antagonists of the present invention are used as an agent to boost immunoresponsiveness among individuals having an acquired loss of B cell function. Conditions resulting in an acquired loss of B cell function that may be ameliorated or treated by administering the polypeptides, antibodies, polynucleotides and/or agonists or antagonists thereof, include, but are not limited to, HIV Infection, AIDS, bone marrow transplant, and B cell chronic lymphocytic leukemia (CLL).

[0545] In another specific embodiment, polypeptides, antibodies, polynucleotides and/or agonists or antagonists of the present invention are used as an agent to boost immunoresponsiveness among individuals having a temporary immune deficiency. Conditions resulting in a temporary immune deficiency that may be ameliorated or treated by administering the polypeptides, antibodies, polynucleotides and/or agonists or antagonists thereof, include, but are not limited to, recovery from viral infections (e.g., influenza), conditions associated with malnutrition, recovery from infectious mononucleosis, or conditions associated with stress, recovery from measles, recovery from blood transfusion, and recovery from surgery.

[0546] In another specific embodiment, polypeptides, antibodies, polynucleotides and/or agonists or antagonists of the present invention are used as a regulator of antigen presentation by monocytes, dendritic cells, and/or B-cells. In one embodiment, polynucleotides, polypeptides, antibodies, and/or agonists or antagonists of the present invention enhance antigen presentation or antagonizes antigen presentation in vitro or in vivo. Moreover, in related embodiments, said enhancement or antagonism of antigen presentation may be useful as an anti-tumor treatment or to modulate the immune system.

[0547] In another specific embodiment, polypeptides, antibodies, polynucleotides and/or agonists or antagonists of the present invention are used as an agent to direct an individual's immune system towards development of a humoral response (i.e. TH2) as opposed to a TH1 cellular response.

[0548] In another specific embodiment, polypeptides, antibodies, polynucleotides and/or agonists or antagonists of the present invention are used as a means to induce tumor proliferation and thus make it more susceptible to anti-neoplastic agents. For example, multiple myeloma is a slowly dividing disease and is thus refractory to virtually all anti-neoplastic regimens. If these cells were forced to proliferate more rapidly their susceptibility profile would likely change.

[0549] In another specific embodiment, polypeptides, antibodies, polynucleotides and/or agonists or antagonists of the present invention are used as a stimulator of B cell production in pathologies such as AIDS, chronic lymphocyte disorder and/or Common Variable Immunodeficiency.

[0550] In another specific embodiment, polypeptides, antibodies, polynucleotides and/or agonists or antagonists of the present invention are used as a therapy for generation and/or regeneration of lymphoid tissues following surgery, trauma or genetic defect. In another specific embodiment, polypeptides, antibodies, polynucleotides and/or agonists or antagonists of the present invention are used in the pretreatment of bone marrow samples prior to transplant.

[0551] In another specific embodiment, polypeptides, antibodies, polynucleotides and/or agonists or antagonists of the present invention are used as a gene-based therapy for genetically inherited disorders resulting in immuno-incompetence/immunodeficiency such as observed among SCID patients.

[0552] In another specific embodiment, polypeptides, antibodies, polynucleotides and/or agonists or antagonists of the present invention are used as a means of activating monocytes/macrophages to defend against parasitic diseases that effect monocytes such as Leishmania.

[0553] In another specific embodiment, polypeptides, antibodies, polynucleotides and/or agonists or antagonists of the present invention are used as a means of regulating secreted cytokines that are elicited by polypeptides of the invention.

[0554] In another embodiment, polypeptides, antibodies, polynucleotides and/or agonists or antagonists of the present invention are used in one or more of the applications described herein, as they may apply to veterinary medicine.

[0555] In another specific embodiment, polypeptides, antibodies, polynucleotides and/or agonists or antagonists of the present invention are used as a means of blocking various aspects of immune responses to foreign agents or self. Examples of diseases or conditions in which blocking of certain aspects of immune responses may be desired include autoimmune disorders such as lupus, and arthritis, as well as immunoresponsiveness to skin allergies, inflammation, bowel disease, injury and diseases/disorders associated with pathogens.

[0556] In another specific embodiment, polypeptides, antibodies, polynucleotides and/or agonists or antagonists of the present invention are used as a therapy for preventing the B cell proliferation and Ig secretion associated with autoimmune diseases such as idiopathic thrombocytopenic purpura, systemic lupus erythematosus and multiple sclerosis.

[0557] In another specific embodiment, polypeptides, antibodies, polynucleotides and/or agonists or antagonists of the present invention are used as a inhibitor of B and/or T cell migration in endothelial cells. This activity disrupts tissue architecture or cognate responses and is useful, for example in disrupting immune responses, and blocking sepsis.

[0558] In another specific embodiment, polypeptides, antibodies, polynucleotides and/or agonists or antagonists of the present invention are used as a therapy for chronic hypergammaglobulinemia evident in such diseases as monoclonal gammopathy of undetermined significance (MGUS), Waldenstrom's disease, related idiopathic monoclonal gammopathies, and plasmacytomas.

[0559] In another specific embodiment, polypeptides, antibodies, polynucleotides and/or agonists or antagonists of the present invention may be employed for instance to inhibit polypeptide chemotaxis and activation of macrophages and their precursors, and of neutrophils, basophils, B lymphocytes and some T-cell subsets, e.g., activated and CD8 cytotoxic T cells and natural killer cells, in certain autoimmune and chronic inflammatory and infective diseases. Examples of autoimmune diseases are described herein and include multiple sclerosis, and insulin-dependent diabetes.

[0560] The polypeptides, antibodies, polynucleotides and/or agonists or antagonists of the present invention may also be employed to treat idiopathic hypereosinophilic syndrome by, for example, preventing eosinophil production and migration.

[0561] In another specific embodiment, polypeptides, antibodies, polynucleotides and/or agonists or antagonists of the present invention are used to enhance or inhibit complement mediated cell lysis.

[0562] In another specific embodiment, polypeptides, antibodies, polynucleotides and/or agonists or antagonists of the present invention are used to enhance or inhibit antibody dependent cellular cytotoxicity.

[0563] In another specific embodiment, polypeptides, antibodies, polynucleotides and/or agonists or antagonists of the present invention may also be employed for treating atherosclerosis, for example, by preventing monocyte infiltration in the artery wall.

[0564] In another specific embodiment, polypeptides, antibodies, polynucleotides and/or agonists or antagonists of the present invention may be employed to treat adult respiratory distress syndrome (ARDS).

[0565] In another specific embodiment, polypeptides, antibodies, polynucleotides and/or agonists or antagonists of the present invention may be useful for stimulating wound and tissue repair, stimulating angiogenesis, and/or stimulating the repair of vascular or lymphatic diseases or disorders. Additionally, agonists and antagonists of the invention may be used to stimulate the regeneration of mucosal surfaces.

[0566] In a specific embodiment, polynucleotides or polypeptides, and/or agonists thereof are used to diagnose, prognose, treat, and/or prevent a disorder characterized by primary or acquired immunodeficiency, deficient serum immunoglobulin production, recurrent infections, and/or immune system dysfunction. Moreover, polynucleotides or polypeptides, and/or agonists thereof may be used to treat or prevent infections of the joints, bones, skin, and/or parotid glands, blood-borne infections (e.g., sepsis, meningitis, septic arthritis, and/or osteomyelitis), autoimmune diseases (e.g., those disclosed herein), inflammatory disorders, and malignancies, and/or any disease or disorder or condition associated with these infections, diseases, disorders and/or malignancies) including, but not limited to, CVID, other primary immune deficiencies, HIV disease, CLL, recurrent bronchitis, sinusitis, otitis media, conjunctivitis, pneumonia, hepatitis, meningitis, herpes zoster (e.g., severe herpes zoster), and/or pneumocystis carnii. Other diseases and disorders that may be prevented, diagnosed, prognosed, and/or treated with polynucleotides or polypeptides, and/or agonists of the present invention include, but are not limited to, HIV infection, HTLV-BLV infection, lymphopenia, phagocyte bactericidal dysfunction anemia, thrombocytopenia, and hemoglobinuria.

[0567] In another embodiment, polynucleotides, polypeptides, antibodies, and/or agonists or antagonists of the present invention are used to treat, and/or diagnose an individual having common variable immunodeficiency disease (“CVID”; also known as “acquired agammaglobulinemia” and “acquired hypogammaglobulinemia”) or a subset of this disease.

[0568] In a specific embodiment, polynucleotides, polypeptides, antibodies, and/or agonists or antagonists of the present invention may be used to diagnose, prognose, prevent, and/or treat cancers or neoplasms including immune cell or immune tissue-related cancers or neoplasms. Examples of cancers or neoplasms that may be prevented, diagnosed, or treated by polynucleotides, polypeptides, antibodies, and/or agonists or antagonists of the present invention include, but are not limited to, acute myelogenous leukemia, chronic myelogenous leukemia, Hodgkin's disease, non-Hodgkin's lymphoma, acute lymphocytic anemia (ALL) Chronic lymphocyte leukemia, plasmacytomas, multiple myeloma, Burkitt's lymphoma, EBV-transformed diseases, and/or diseases and disorders described in the section entitled “Hyperproliferative Disorders” elsewhere herein.

[0569] In another specific embodiment, polypeptides, antibodies, polynucleotides and/or agonists or antagonists of the present invention are used as a therapy for decreasing cellular proliferation of Large B-cell Lymphomas.

[0570] In another specific embodiment, polypeptides, antibodies, polynucleotides and/or agonists or antagonists of the present invention are used as a means of decreasing the involvement of B cells and Ig associated with Chronic Myelogenous Leukemia.

[0571] In specific embodiments, the compositions of the invention are used as an agent to boost immunoresponsiveness among B cell immunodeficient individuals, such as, for example, an individual who has undergone a partial or complete splenectomy.

[0572] Antagonists of the invention include, for example, binding and/or inhibitory antibodies, antisense nucleic acids, ribozymes or soluble forms of the polypeptides of the present invention (e.g., Fc fusion protein; see, e.g., Example 9). Agonists of the invention include, for example, binding or stimulatory antibodies, and soluble forms of the polypeptides (e.g., Fc fusion proteins; see, e.g., Example 9). Polypeptides, antibodies, polynucleotides and/or agonists or antagonists of the present invention may be employed in a composition with a pharmaceutically acceptable carrier, e.g., as described herein.

[0573] In another embodiment, polypeptides, antibodies, polynucleotides and/or agonists or antagonists of the present invention are administered to an animal (including, but not limited to, those listed above, and also including transgenic animals) incapable of producing functional endogenous antibody molecules or having an otherwise compromised endogenous immune system, but which is capable of producing human immunoglobulin molecules by means of a reconstituted or partially reconstituted immune system from another animal (see, e.g., published PCT Application Nos. WO98/24893, WO/9634096, WO/9633735, and WO/9110741). Administration of polypeptides, antibodies, polynucleotides and/or agonists or antagonists of the present invention to such animals is useful for the generation of monoclonal antibodies against the polypeptides, antibodies, polynucleotides and/or agonists or antagonists of the present invention.

[0574] Blood-Related Disorders

[0575] The polynucleotides, polypeptides, antibodies, and/or agonists or antagonists of the present invention may be used to modulate hemostatic (the stopping of bleeding) or thrombolytic (clot dissolving) activity. For example, by increasing hemostatic or thrombolytic activity, polynucleotides or polypeptides, and/or agonists or antagonists of the present invention could be used to treat or prevent blood coagulation diseases, disorders, and/or conditions (e.g., afibrinogenemia, factor deficiencies, hemophilia), blood platelet diseases, disorders, and/or conditions (e.g., thrombocytopenia), or wounds resulting from trauma, surgery, or other causes. Alternatively, polynucleotides, polypeptides, antibodies, and/or agonists or antagonists of the present invention that can decrease hemostatic or thrombolytic activity could be used to inhibit or dissolve clotting. These molecules could be important in the treatment or prevention of heart attacks (infarction), strokes, or scarring.

[0576] In specific embodiments, the polynucleotides, polypeptides, antibodies, and/or agonists or antagonists of the present invention may be used to prevent, diagnose, prognose, and/or treat thrombosis, arterial thrombosis, venous thrombosis, thromboembolism, pulmonary embolism, atherosclerosis, myocardial infarction, transient ischemic attack, unstable angina. In specific embodiments, the polynucleotides, polypeptides, antibodies, and/or agonists or antagonists of the present invention may be used for the prevention of occulsion of saphenous grafts, for reducing the risk of periprocedural thrombosis as might accompany angioplasty procedures, for reducing the risk of stroke in patients with atrial fibrillation including nonrheumatic atrial fibrillation, for reducing the risk of embolism associated with mechanical heart valves and or mitral valves disease. Other uses for the polynucleotides, polypeptides, antibodies, and/or agonists or antagonists of the present invention, include, but are not limited to, the prevention of occlusions in extrcorporeal devices (e.g., intravascular canulas, vascular access shunts in hemodialysis patients, hemodialysis machines, and cardiopulmonary bypass machines).

[0577] In another embodiment, a polypeptide of the invention, or polynucleotides, antibodies, agonists, or antagonists corresponding to that polypeptide, may be used to prevent, diagnose, prognose, and/or treat diseases and disorders of the blood and/or blood forming organs associated with the tissue(s) in which the polypeptide of the invention is expressed, including one, two, three, four, five, or more tissues disclosed in Table 1A, column 7 (Tissue Distribution Library Code).

[0578] The polynucleotides, polypeptides, antibodies, and/or agonists or antagonists of the present invention may be used to modulate hematopoietic activity (the formation of blood cells). For example, the polynucleotides, polypeptides, antibodies, and/or agonists or antagonists of the present invention may be used to increase the quantity of all or subsets of blood cells, such as, for example, erythrocytes, lymphocytes (B or T cells), myeloid cells (e.g., basophils, eosinophils, neutrophils, mast cells, macrophages) and platelets. The ability to decrease the quantity of blood cells or subsets of blood cells may be useful in the prevention, detection, diagnosis and/or treatment of anemias and leukopenias described below. Alternatively, the polynucleotides, polypeptides, antibodies, and/or agonists or antagonists of the present invention may be used to decrease the quantity of all or subsets of blood cells, such as, for example, erythrocytes, lymphocytes (B or T cells), myeloid cells (e.g., basophils, eosinophils, neutrophils, mast cells, macrophages) and platelets. The ability to decrease the quantity of blood cells or subsets of blood cells may be useful in the prevention, detection, diagnosis and/or treatment of leukocytoses, such as, for example eosinophilia.

[0579] The polynucleotides, polypeptides, antibodies, and/or agonists or antagonists of the present invention may be used to prevent, treat, or diagnose blood dyscrasia.

[0580] Anemias are conditions in which the number of red blood cells or amount of hemoglobin (the protein that carries oxygen) in them is below normal. Anemia may be caused by excessive bleeding, decreased red blood cell production, or increased red blood cell destruction (hemolysis). The polynucleotides, polypeptides, antibodies, and/or agonists or antagonists of the present invention may be useful in treating, preventing, and/or diagnosing anemias. Anemias that may be treated prevented or diagnosed by the polynucleotides, polypeptides, antibodies, and/or agonists or antagonists of the present invention include iron deficiency anemia, hypochromic anemia, microcytic anemia, chlorosis, hereditary siderob;astic anemia, idiopathic acquired sideroblastic anemia, red cell aplasia, megaloblastic anemia (e.g., pernicious anemia, (vitamin B12 deficiency) and folic acid deficiency anemia), aplastic anemia, hemolytic anemias (e.g., autoimmune helolytic anemia, microangiopathic hemolytic anemia, and paroxysmal nocturnal hemoglobinuria). The polynucleotides, polypeptides, antibodies, and/or agonists or antagonists of the present invention may be useful in treating, preventing, and/or diagnosing anemias associated with diseases including but not limited to, anemias associated with systemic lupus erythematosus, cancers, lymphomas, chronic renal disease, and enlarged spleens. The polynucleotides, polypeptides, antibodies, and/or agonists or antagonists of the present invention may be useful in treating, preventing, and/or diagnosing anemias arising from drug treatments such as anemias associated with methyldopa, dapsone, and/or sulfadrugs. Additionally, the polynucleotides, polypeptides, antibodies, and/or agonists or antagonists of the present invention may be useful in treating, preventing, and/or diagnosing anemias associated with abnormal red blood cell architecture including but not limited to, hereditary spherocytosis, hereditary elliptocytosis, glucose-6-phosphate dehydrogenase deficiency, and sickle cell anemia.

[0581] The polynucleotides, polypeptides, antibodies, and/or agonists or antagonists of the present invention may be useful in treating, preventing, and/or diagnosing hemoglobin abnormalities, (e.g., those associated with sickle cell anemia, hemoglobin C disease, hemoglobin S-C disease, and hemoglobin E disease). Additionally, the polynucleotides, polypeptides, antibodies, and/or agonists or antagonists of the present invention may be useful in diagnosing, prognosing, preventing, and/or treating thalassemias, including, but not limited to major and minor forms of alpha-thalassemia and beta-thalassemia.

[0582] In another embodiment, the polynucleotides, polypeptides, antibodies, and/or agonists or antagonists of the present invention may be useful in diagnosing, prognosing, preventing, and/or treating bleeding disorders including, but not limited to, thrombocytopenia (e.g., idiopathic thrombocytopenic purpura, and thrombotic thrombocytopenic purpura), Von Willebrand's disease, hereditary platelet disorders (e.g., storage pool disease such as Chediak-Higashi and Hermansky-Pudlak syndromes, thromboxane A2 dysfunction, thromboasthenia, and Bernard-Soulier syndrome), hemolytic-uremic syndrome, hemophelias such as hemophelia A or Factor VII deficiency and Christmas disease or Factor IX deficiency, Hereditary Hemorhhagic Telangiectsia, also known as Rendu-Osler-Weber syndrome, allergic purpura (Henoch Schonlein purpura) and disseminated intravascular coagulation.

[0583] The effect of the polynucleotides, polypeptides, antibodies, and/or agonists or antagonists of the present invention on the clotting time of blood may be monitored using any of the clotting tests known in the art including, but not limited to, whole blood partial thromboplastin time (PTT), the activated partial thromboplastin time (aPTT), the activated clotting time (ACT), the recalcified activated clotting time, or the Lee-White Clotting time.

[0584] Several diseases and a variety of drugs can cause platelet dysfunction. Thus, in a specific embodiment, the polynucleotides, polypeptides, antibodies, and/or agonists or antagonists of the present invention may be useful in diagnosing, prognosing, preventing, and/or treating acquired platelet dysfunction such as platelet dysfunction accompanying kidney failure, leukemia, multiple myeloma, cirrhosis of the liver, and systemic lupus erythematosus as well as platelet dysfunction associated with drug treatments, including treatment with aspirin, ticlopidine, nonsteroidal anti-inflammatory drugs (used for arthritis, pain, and sprains), and penicillin in high doses.

[0585] In another embodiment, the polynucleotides, polypeptides, antibodies, and/or agonists or antagonists of the present invention may be useful in diagnosing, prognosing, preventing, and/or treating diseases and disorders characterized by or associated with increased or decreased numbers of white blood cells. Leukopenia occurs when the number of white blood cells decreases below normal. Leukopenias include, but are not limited to, neutropenia and lymphocytopenia. An increase in the number of white blood cells compared to normal is known as leukocytosis. The body generates increased numbers of white blood cells during infection. Thus, leukocytosis may simply be a normal physiological parameter that reflects infection. Alternatively, leukocytosis may be an indicator of injury or other disease such as cancer. Leokocytoses, include but are not limited to, eosinophilia, and accumulations of macrophages. In specific embodiments, the polynucleotides, polypeptides, antibodies, and/or agonists or antagonists of the present invention may be useful in diagnosing, prognosing, preventing, and/or treating leukopenia. In other specific embodiments, the polynucleotides, polypeptides, antibodies, and/or agonists or antagonists of the present invention may be useful in diagnosing, prognosing, preventing, and/or treating leukocytosis

[0586] Leukopenia may be a generalized decreased in all types of white blood cells, or may be a specific depletion of particular types of white blood cells. Thus, in specific embodiments, the polynucleotides, polypeptides, antibodies, and/or agonists or antagonists of the present invention may be useful in diagnosing, prognosing, preventing, and/or treating decreases in neutrophil numbers, known as neutropenia. Neutropenias that may be diagnosed, prognosed, prevented, and/or treated by the polynucleotides, polypeptides, antibodies, and/or agonists or antagonists of the present invention include, but are not limited to, infantile genetic agranulocytosis, familial neutropenia, cyclic neutropenia, neutropenias resulting from or associated with dietary deficiencies (e.g., vitamin B 12 deficiency or folic acid deficiency), neutropenias resulting from or associated with drug treatments (e.g., antibiotic regimens such as penicillin treatment, sulfonamide treatment, anticoagulant treatment, anticonvulsant drugs, anti-thyroid drugs, and cancer chemotherapy), and neutropenias resulting from increased neutrophil destruction that may occur in association with some bacterial or viral infections, allergic disorders, autoimmune diseases, conditions in which an individual has an enlarged spleen (e.g., Felty syndrome, malaria and sarcoidosis), and some drug treatment regimens.

[0587] The polynucleotides, polypeptides, antibodies, and/or agonists or antagonists of the present invention may be useful in diagnosing, prognosing, preventing, and/or treating lymphocytopenias (decreased numbers of B and/or T lymphocytes), including, but not limited lymphocytopenias resulting from or associated with stress, drug treatments (e.g., drug treatment with corticosteroids, cancer chemotherapies, and/or radiation therapies), AIDS infection and/or other diseases such as, for example, cancer, rheumatoid arthritis, systemic lupus erythematosus, chronic infections, some viral infections and/or hereditary disorders (e.g., DiGeorge syndrome, Wiskott-Aldrich Syndrome, severe combined immunodeficiency, ataxia telangiectsia).

[0588] The polynucleotides, polypeptides, antibodies, and/or agonists or antagonists of the present invention may be useful in diagnosing, prognosing, preventing, and/or treating diseases and disorders associated with macrophage numbers and/or macrophage function including, but not limited to, Gaucher's disease, Niemann-Pick disease, Letterer-Siwe disease and Hand-Schuller-Christian disease.

[0589] In another embodiment, the polynucleotides, polypeptides, antibodies, and/or agonists or antagonists of the present invention may be useful in diagnosing, prognosing, preventing, and/or treating diseases and disorders associated with eosinophil numbers and/or eosinophil function including, but not limited to, idiopathic hypereosinophilic syndrome, eosinophilia-myalgia syndrome, and Hand-Schuller-Christian disease.

[0590] In yet another embodiment, the polynucleotides, polypeptides, antibodies, and/or agonists or antagonists of the present invention may be useful in diagnosing, prognosing, preventing, and/or treating leukemias and lymphomas including, but not limited to, acute lymphocytic (lymphpblastic) leukemia (ALL), acute myeloid (myelocytic, myelogenous, myeloblastic, or myelomonocytic) leukemia, chronic lymphocytic leukemia (e.g., B cell leukemias, T cell leukemias, Sezary syndrome, and Hairy cell leukenia), chronic myelocytic (myeloid, myelogenous, or granulocytic) leukemia, Hodgkin's lymphoma, non-hodgkin's lymphoma, Burkitt's lymphoma, and mycosis fungoides.

[0591] In other embodiments, the polynucleotides, polypeptides, antibodies, and/or agonists or antagonists of the present invention may be useful in diagnosing, prognosing, preventing, and/or treating diseases and disorders of plasma cells including, but not limited to, plasma cell dyscrasias, monoclonal gammaopathies, monoclonal gammopathies of undetermined significance, multiple myeloma, macroglobulinemia, Waldenstrom's macroglobulinemia, cryoglobulinemia, and Raynaud's phenomenon.

[0592] In other embodiments, the polynucleotides, polypeptides, antibodies, and/or agonists or antagonists of the present invention may be useful in treating, preventing, and/or diagnosing myeloproliferative disorders, including but not limited to, polycythemia vera, relative polycythemia, secondary polycythemia, myelofibrosis, acute myelofibrosis, agnogenic myelod metaplasia, thrombocythemia, (including both primary and seconday thrombocythemia) and chronic myelocytic leukemia.

[0593] In other embodiments, the polynucleotides, polypeptides, antibodies, and/or agonists or antagonists of the present invention may be useful as a treatment prior to surgery, to increase blood cell production.

[0594] In other embodiments, the polynucleotides, polypeptides, antibodies, and/or agonists or antagonists of the present invention may be useful as an agent to enhance the migration, phagocytosis, superoxide production, antibody dependent cellular cytotoxicity of neutrophils, eosionophils and macrophages.

[0595] In other embodiments, the polynucleotides, polypeptides, antibodies, and/or agonists or antagonists of the present invention may be useful as an agent to increase the number of stem cells in circulation prior to stem cells pheresis. In another specific embodiment, the polynucleotides, polypeptides, antibodies, and/or agonists or antagonists of the present invention may be useful as an agent to increase the number of stem cells in circulation prior to platelet pheresis.

[0596] In other embodiments, the polynucleotides, polypeptides, antibodies, and/or agonists or antagonists of the present invention may be useful as an agent to increase cytokine production.

[0597] In other embodiments, the polynucleotides, polypeptides, antibodies, and/or agonists or antagonists of the present invention may be useful in preventing, diagnosing, and/or treating primary hematopoietic disorders.

[0598] Hyperproliferative Disorders

[0599] Lung associated polynucleotides or polypeptides, or agonists or antagonists thereof, can be used to treat, prevent, diagnose and/or prognose hyperproliferative diseases, disorders, and/or conditions, including neoplasms.

[0600] In a specific embodiment, lung associated polynucleotides or polypeptides, or agonists or antagonists thereof, can be used to treat, prevent, and/or diagnose hyperproliferative diseases, disorders, and/or conditions of the lung.

[0601] In a preferred embodiment, lung associated polynucleotides or polypeptides, or agonists or antagonists thereof, can be used to treat, prevent, and/or diagnose lung neoplasms.

[0602] Lung associated polynucleotides or polypeptides, or agonists or antagonists of the invention, may inhibit the proliferation of the disorder through direct or indirect interactions. Alternatively, lung associated polynucleotides or polypeptides, or agonists or antagonists thereof, may proliferate other cells, which can inhibit the hyperproliferative disorder.

[0603] For example, by increasing an immune response, particularly increasing antigenic qualities of the hyperproliferative disorder or by proliferating, differentiating, or mobilizing T-cells, hyperproliferative diseases, disorders, and/or conditions can be treated, prevented, and/or diagnosed. This immune response may be increased by either enhancing an existing immune response, or by initiating a new immune response. Alternatively, decreasing an immune response may also be a method of treating, preventing, and/or diagnosing hyperproliferative diseases, disorders, and/or conditions, such as a chemotherapeutic agent.

[0604] Examples of hyperproliferative diseases, disorders, and/or conditions that can be treated, prevented, and/or diagnosed by lung associated polynucleotides or polypeptides, or agonists or antagonists thereof, include, but are not limited to neoplasms located in the: prostate, colon, abdomen, bone, breast, digestive system, liver, pancreas, peritoneum, endocrine glands (adrenal, parathyroid, pituitary, testicles, ovary, thymus, thyroid), eye, head and neck, nervous (central and peripheral), lymphatic system, pelvic, skin, soft tissue, spleen, thoracic, and urogenital.

[0605] Similarly, other hyperproliferative disorders can also be treated or detected by polynucleotides or polypeptides, or agonists or antagonists of the present invention. Examples of such hyperproliferative disorders include, but are not limited to: Acute Childhood Lymphoblastic Leukemia, Acute Lymphoblastic Leukemia, Acute Lymphocytic Leukemia, Acute Myeloid Leukemia, Adrenocortical Carcinoma, Adult (Primary) Hepatocellular Cancer, Adult (Primary) Liver Cancer, Adult Acute Lymphocytic Leukemia, Adult Acute Myeloid Leukemia, Adult Hodgkin's Disease, Adult Hodgkin's Lymphoma, Adult Lymphocytic Leukemia, Adult Non-Hodgkin's Lymphoma, Adult Primary Liver Cancer, Adult Soft Tissue Sarcoma, AIDS-Related Lymphoma, AIDS-Related Malignancies, Anal Cancer, Astrocytoma, Bile Duct Cancer, Bladder Cancer, Bone Cancer, Brain Stem Glioma, Brain Tumors, Breast Cancer, Cancer of the Renal Pelvis and Ureter, Central Nervous System (Primary) Lymphoma, Central Nervous System Lymphoma, Cerebellar Astrocytoma, Cerebral Astrocytoma, Cervical Cancer, Childhood (Primary) Hepatocellular Cancer, Childhood (Primary) Liver Cancer, Childhood Acute Lymphoblastic Leukemia, Childhood Acute Myeloid Leukemia, Childhood Brain Stem Glioma, Childhood Cerebellar Astrocytoma, Childhood Cerebral Astrocytoma, Childhood Extracranial Germ Cell Tumors, Childhood Hodgkin's Disease, Childhood Hodgkin's Lymphoma, Childhood Hypothalamic and Visual Pathway Glioma, Childhood Lymphoblastic Leukemia, Childhood Medulloblastoma, Childhood Non-Hodgkin's Lymphoma, Childhood Pineal and Supratentorial Primitive Neuroectodermal Tumors, Childhood Primary Liver Cancer, Childhood Rhabdomyosarcoma, Childhood Soft Tissue Sarcoma, Childhood Visual Pathway and Hypothalamic Glioma, Chronic Lymphocytic Leukemia, Chronic Myelogenous Leukemia, Colon Cancer, Cutaneous T-Cell Lymphoma, Endocrine Pancreas Islet Cell Carcinoma, Endometrial Cancer, Ependymoma, Epithelial Cancer, Esophageal Cancer, Ewing's Sarcoma and Related Tumors, Exocrine Pancreatic Cancer, Extracranial Germ Cell Tumor, Extragonadal Germ Cell Tumor, Extrahepatic Bile Duct Cancer, Eye Cancer, Female Breast Cancer, Gaucher's Disease, Gallbladder Cancer, Gastric Cancer, Gastrointestinal Carcinoid Tumor, Gastrointestinal Tumors, Germ Cell Tumors, Gestational Trophoblastic Tumor, Hairy Cell Leukemia, Head and Neck Cancer, Hepatocellular Cancer, Hodgkin's Disease, Hodgkin's Lymphoma, Hypergammaglobulinemia, Hypopharyngeal Cancer, Intestinal Cancers, Intraocular Melanoma, Islet Cell Carcinoma, Islet Cell Pancreatic Cancer, Kaposi's Sarcoma, Kidney Cancer, Laryngeal Cancer, Lip and Oral Cavity Cancer, Liver Cancer, Lung Cancer, Lymphoproliferative Disorders, Macroglobulinemia, Male Breast Cancer, Malignant Mesothelioma, Malignant Thymoma, Medulloblastoma, Melanoma, Mesothelioma, Metastatic Occult Primary Squamous Neck Cancer, Metastatic Primary Squamous Neck Cancer, Metastatic Squamous Neck Cancer, Multiple Myeloma, Multiple Myeloma/Plasma Cell Neoplasm, Myelodysplastic Syndrome, Myelogenous Leukemia, Myeloid Leukemia, Myeloproliferative Disorders, Nasal Cavity and Paranasal Sinus Cancer, Nasopharyngeal Cancer, Neuroblastoma, Non-Hodgkin's Lymphoma During Pregnancy, Nonmelanoma Skin Cancer, Non-Small Cell Lung Cancer, Occult Primary Metastatic Squamous Neck Cancer, Oropharyngeal Cancer, Osteo-/Malignant Fibrous Sarcoma, Osteosarcoma/Malignant Fibrous Histiocytoma, Osteosarcoma/Malignant Fibrous Histiocytoma of Bone, Ovarian Epithelial Cancer, Ovarian Germ Cell Tumor, Ovarian Low Malignant Potential Tumor, Pancreatic Cancer, Paraproteinemias, Purpura, Parathyroid Cancer, Penile Cancer, Pheochromocytoma, Pituitary Tumor, Plasma Cell Neoplasm/Multiple Myeloma, Primary Central Nervous System Lymphoma, Primary Liver Cancer, Prostate Cancer, Rectal Cancer, Renal Cell Cancer, Renal Pelvis and Ureter Cancer, Retinoblastoma, Rhabdomyosarcoma, Salivary Gland Cancer, Sarcoidosis Sarcomas, Sezary Syndrome, Skin Cancer, Small Cell Lung Cancer, Small Intestine Cancer, Soft Tissue Sarcoma, Squamous Neck Cancer, Stomach Cancer, Supratentorial Primitive Neuroectodermal and Pineal Tumors, T-Cell Lymphoma, Testicular Cancer, Thymoma, Thyroid Cancer, Transitional Cell Cancer of the Renal Pelvis and Ureter, Transitional Renal Pelvis and Ureter Cancer, Trophoblastic Tumors, Ureter and Renal Pelvis Cell Cancer, Urethral Cancer, Uterine Cancer, Uterine Sarcoma, Vaginal Cancer, Visual Pathway and Hypothalamic Glioma, Vulvar Cancer, Waldenstrom's Macroglobulinemia, Wilms' Tumor, and any other hyperproliferative disease, besides neoplasia, located in an organ system listed above.

[0606] In another preferred embodiment, polynucleotides or polypeptides, or agonists or antagonists of the present invention are used to diagnose, prognose, prevent, and/or treat premalignant conditions and to prevent progression to a neoplastic or malignant state, including but not limited to those disorders described above. Such uses are indicated in conditions known or suspected of preceding progression to neoplasia or cancer, in particular, where non-neoplastic cell growth consisting of hyperplasia, metaplasia, or most particularly, dysplasia has occurred (for review of such abnormal growth conditions, see Robbins and Angell, 1976, Basic Pathology, 2d Ed., W. B. Saunders Co., Philadelphia, pp. 68-79.)

[0607] Hyperplasia is a form of controlled cell proliferation, involving an increase in cell number in a tissue or organ, without significant alteration in structure or function. Hyperplastic disorders which can be diagnosed, prognosed, prevented, and/or treated with compositions of the invention (including polynucleotides, polypeptides, agonists or antagonists) include, but are not limited to, angiofollicular mediastinal lymph node hyperplasia, angiolymphoid hyperplasia with eosinophilia, atypical melanocytic hyperplasia, basal cell hyperplasia, benign giant lymph node hyperplasia, cementum hyperplasia, congenital adrenal hyperplasia, congenital sebaceous hyperplasia, cystic hyperplasia, cystic hyperplasia of the breast, denture hyperplasia, ductal hyperplasia, endometrial hyperplasia, fibromuscular hyperplasia, focal epithelial hyperplasia, gingival hyperplasia, inflammatory fibrous hyperplasia, inflammatory papillary hyperplasia, intravascular papillary endothelial hyperplasia, nodular hyperplasia of prostate, nodular regenerative hyperplasia, pseudoepitheliomatous hyperplasia, senile sebaceous hyperplasia, and verrucous hyperplasia.

[0608] Metaplasia is a form of controlled cell growth in which one type of adult or fully differentiated cell substitutes for another type of adult cell. Metaplastic disorders which can be diagnosed, prognosed, prevented, and/or treated with compositions of the invention (including polynucleotides, polypeptides, agonists or antagonists) include, but are not limited to, agnogenic myeloid metaplasia, apocrine metaplasia, atypical metaplasia, autoparenchymatous metaplasia, connective tissue metaplasia, epithelial metaplasia, intestinal metaplasia, metaplastic anemia, metaplastic ossification, metaplastic polyps, myeloid metaplasia, primary myeloid metaplasia, secondary myeloid metaplasia, squamous metaplasia, squamous metaplasia of amnion, and symptomatic myeloid metaplasia.

[0609] Dysplasia is frequently a forerunner of cancer, and is found mainly in the epithelia; it is the most disorderly form of non-neoplastic cell growth, involving a loss in individual cell uniformity and in the architectural orientation of cells. Dysplastic cells often have abnormally large, deeply stained nuclei, and exhibit pleomorphism. Dysplasia characteristically occurs where there exists chronic irritation or inflammation. Dysplastic disorders which can be diagnosed, prognosed, prevented, and/or treated with compositions of the invention (including polynucleotides, polypeptides, agonists or antagonists) include, but are not limited to, anhidrotic ectodermal dysplasia, anterofacial dysplasia, asphyxiating thoracic dysplasia, atriodigital dysplasia, bronchopulmonary dysplasia, cerebral dysplasia, cervical dysplasia, chondroectodermal dysplasia, cleidocranial dysplasia, congenital ectodermal dysplasia, craniodiaphysial dysplasia, craniocarpotarsal dysplasia, craniometaphysial dysplasia, dentin dysplasia, diaphysial dysplasia, ectodermal dysplasia, enamel dysplasia, encephalo-ophthalmic dysplasia, dysplasia epiphysialis hemimelia, dysplasia epiphysialis multiplex, dysplasia epiphysialis punctata, epithelial dysplasia, faciodigitogenital dysplasia, familial fibrous dysplasia of jaws, familial white folded dysplasia, fibromuscular dysplasia, fibrous dysplasia of bone, florid osseous dysplasia, hereditary renal-retinal dysplasia, hidrotic ectodermal dysplasia, hypohidrotic ectodermal dysplasia, lymphopenic thymic dysplasia, mammary dysplasia, mandibulofacial dysplasia, metaphysial dysplasia, Mondini dysplasia, monostotic fibrous dysplasia, mucoepithelial dysplasia, multiple epiphysial dysplasia, oculoauriculovertebral dysplasia, oculodentodigital dysplasia, oculovertebral dysplasia, odontogenic dysplasia, ophthalmomandibulomelic dysplasia, periapical cemental dysplasia, polyostotic fibrous dysplasia, pseudoachondroplastic spondyloepiphysial dysplasia, retinal dysplasia, septo-optic dysplasia, spondyloepiphysial dysplasia, and ventriculoradial dysplasia.

[0610] Additional pre-neoplastic disorders which can be diagnosed, prognosed, prevented, and/or treated with compositions of the invention (including polynucleotides, polypeptides, agonists or antagonists) include, but are not limited to, benign dysproliferative disorders (e.g., benign tumors, fibrocystic conditions, tissue hypertrophy, intestinal polyps, colon polyps, and esophageal dysplasia), leukoplakia, keratoses, Bowen's disease, Farmer's Skin, solar cheilitis, and solar keratosis.

[0611] In another embodiment, a polypeptide of the invention, or polynucleotides, antibodies, agonists, or antagonists corresponding to that polypeptide, may be used to diagnose and/or prognose disorders associated with the tissue(s) in which the polypeptide of the invention is expressed, including one, two, three, four, five, or more tissues disclosed in Table 1A, 7 (Tissue Distribution Library Code).

[0612] In another embodiment, polynucleotides, polypeptides, antibodies, and/or agonists or antagonists of the present invention conjugated to a toxin or a radioactive isotope, as described herein, may be used to treat cancers and neoplasms, including, but not limited to those described herein. In a further preferred embodiment, polynucleotides, polypeptides, antibodies, and/or agonists or antagonists of the present invention conjugated to a toxin or a radioactive isotope, as described herein, may be used to treat acute myelogenous leukemia.

[0613] Additionally, polynucleotides, polypeptides, and/or agonists or antagonists of the invention may affect apoptosis, and therefore, would be useful in treating a number of diseases associated with increased cell survival or the inhibition of apoptosis. For example, diseases associated with increased cell survival or the inhibition of apoptosis that could be diagnosed, prognosed, prevented, and/or treated by polynucleotides, polypeptides, and/or agonists or antagonists of the invention, include cancers (such as follicular lymphomas, carcinomas with p53 mutations, and hormone-dependent tumors, including, but not limited to colon cancer, cardiac tumors, pancreatic cancer, melanoma, retinoblastoma, glioblastoma, lung cancer, intestinal cancer, testicular cancer, stomach cancer, neuroblastoma, myxoma, myoma, lymphoma, endothelioma, osteoblastoma, osteoclastoma, osteosarcoma, chondrosarcoma, adenoma, breast cancer, prostate cancer, Kaposi's sarcoma and ovarian cancer); autoimmune disorders such as, multiple sclerosis, Sjogren's syndrome, Hashimoto's thyroiditis, biliary cirrhosis, Behcet's disease, Crohn's disease, polymyositis, systemic lupus erythematosus and immune-related glomerulonephritis and rheumatoid arthritis) and viral infections (such as herpes viruses, pox viruses and adenoviruses), inflammation, graft v. host disease, acute graft rejection, and chronic graft rejection.

[0614] In preferred embodiments, polynucleotides, polypeptides, and/or agonists or antagonists of the invention are used to inhibit growth, progression, and/or metastasis of cancers, in particular those listed above.

[0615] Additional diseases or conditions associated with increased cell survival that could be diagnosed, prognosed, prevented, and/or treated by polynucleotides, polypeptides, and/or agonists or antagonists of the invention, include, but are not limited to, progression, and/or metastases of malignancies and related disorders such as leukemia (including acute leukemias (e.g., acute lymphocytic leukemia, acute myelocytic leukemia (including myeloblastic, promyelocytic, myelomonocytic, monocytic, and erythroleukemia)) and chronic leukemias (e.g., chronic myelocytic (granulocytic) leukemia and chronic lymphocytic leukemia)), polycythemia vera, lymphomas (e.g., Hodgkin's disease and non-Hodgkin's disease), multiple myeloma, Waldenstrom's macroglobulinemia, heavy chain disease, and solid tumors including, but not limited to, sarcomas and carcinomas such as fibrosarcoma, myxosarcoma, liposarcoma, chondrosarcoma, osteogenic sarcoma, chordoma, angiosarcoma, endotheliosarcoma, lymphangiosarcoma, lymphangioendotheliosarcoma, synovioma, mesothelioma, Ewing's tumor, leiomyosarcoma, rhabdomyosarcoma, colon carcinoma, pancreatic cancer, breast cancer, ovarian cancer, prostate cancer, squamous cell carcinoma, basal cell carcinoma, adenocarcinoma, sweat gland carcinoma, sebaceous gland carcinoma, papillary carcinoma, papillary adenocarcinomas, cystadenocarcinoma, medullary carcinoma, bronchogenic carcinoma, renal cell carcinoma, hepatoma, bile duct carcinoma, choriocarcinoma, seminoma, embryonal carcinoma, Wilm's tumor, cervical cancer, testicular tumor, lung carcinoma, small cell lung carcinoma, bladder carcinoma, epithelial carcinoma, glioma, astrocytoma, medulloblastoma, craniopharyngioma, ependymoma, pinealoma, emangioblastoma, acoustic neuroma, oligodendroglioma, menangioma, melanoma, neuroblastoma, and retinoblastoma.

[0616] Diseases associated with increased apoptosis that could be diagnosed, prognosed, prevented, and/or treated by polynucleotides, polypeptides, and/or agonists or antagonists of the invention, include AIDS; neurodegenerative disorders (such as Alzheimer's disease, Parkinson's disease, amyotrophic lateral sclerosis, retinitis pigmentosa, cerebellar degeneration and brain tumor or prior associated disease); autoimmune disorders (such as, multiple sclerosis, Sjogren's syndrome, Hashimoto's thyroiditis, biliary cirrhosis, Behcet's disease, Crohn's disease, polymyositis, systemic lupus erythematosus and immune-related glomerulonephritis and rheumatoid arthritis) myelodysplastic syndromes (such as aplastic anemia), graft v. host disease, ischemic injury (such as that caused by myocardial infarction, stroke and reperfusion injury), liver injury (e.g., hepatitis related liver injury, ischemia/reperfusion injury, cholestosis (bile duct injury) and liver cancer); toxin-induced liver disease (such as that caused by alcohol), septic shock, cachexia and anorexia.

[0617] Hyperproliferative diseases and/or disorders that could be diagnosed, prognosed, prevented, and/or treated by polynucleotides, polypeptides, and/or agonists or antagonists of the invention, include, but are not limited to, neoplasms located in the liver, abdomen, bone, breast, digestive system, pancreas, peritoneum, endocrine glands (adrenal, parathyroid, pituitary, testicles, ovary, thymus, thyroid), eye, head and neck, nervous system (central and peripheral), lymphatic system, pelvis, skin, soft tissue, spleen, thorax, and urogenital tract.

[0618] Similarly, other hyperproliferative disorders can also be diagnosed, prognosed, prevented, and/or treated by polynucleotides, polypeptides, and/or agonists or antagonists of the invention. Examples of such hyperproliferative disorders include, but are not limited to: hypergammaglobulinemia, lymphoproliferative disorders, paraproteinemias, purpura, sarcoidosis, Sezary Syndrome, Waldenstron's macroglobulinemia, Gaucher's Disease, histiocytosis, and any other hyperproliferative disease, besides neoplasia, located in an organ system listed above.

[0619] One preferred embodiment utilizes polynucleotides of the present invention to inhibit aberrant cellular division, by gene therapy using the present invention, and/or protein fusions or fragments thereof.

[0620] Thus, the present invention provides a method for treating cell proliferative diseases, disorders, and/or conditions by inserting into an abnormally proliferating cell a polynucleotide of the present invention, wherein said polynucleotide represses said cell proliferation, disease, disorder, and/or condition.

[0621] In a preferred embodiment, the present invention provides a method for treating cell proliferative diseases, disorders and/or conditions of the lung by inserting into a cell, a polynucleotide of the present invention, wherein said polynucleotide represses said cell proliferation, disease and/or disorder.

[0622] Another embodiment of the present invention provides a method of treating cell-proliferative diseases, disorders, and/or conditions in individuals comprising administration of one or more active gene copies of the present invention to an abnormally proliferating cell or cells. In a preferred embodiment, polynucleotides of the present invention is a DNA construct comprising a recombinant expression vector effective in expressing a DNA sequence encoding said polynucleotides. In another preferred embodiment of the present invention, the DNA construct encoding the polynucleotides of the present invention is inserted into cells to be treated utilizing a retrovirus, or more preferably an adenoviral vector (see, e.g., G J. Nabel, et. al., PNAS 96: 324-326 (1999), which is hereby incorporated by reference). In a most preferred embodiment, the viral vector is defective and will not transform non-proliferating cells, only proliferating cells. Moreover, in a preferred embodiment, the polynucleotides of the present invention inserted into proliferating cells either alone, or in combination with or fused to other polynucleotides, can then be modulated via an external stimulus (i.e., magnetic, specific small molecule, chemical, or drug administration, etc.), which acts upon the promoter upstream of said polynucleotides to induce expression of the encoded protein product. As such the beneficial therapeutic affect of the present invention may be expressly modulated (i.e., to increase, decrease, or inhibit expression of the present invention) based upon said external stimulus.

[0623] Polynucleotides of the present invention may be useful in repressing expression of oncogenic genes or antigens. By “repressing expression of the oncogenic genes” is intended the suppression of the transcription of the gene, the degradation of the gene transcript (pre-message RNA), the inhibition of splicing, the destruction of the messenger RNA, the prevention of the post-translational modifications of the protein, the destruction of the protein, or the inhibition of the normal function of the protein.

[0624] For local administration to abnormally proliferating cells, polynucleotides of the present invention may be administered by any method known to those of skill in the art including, but not limited to transfection, electroporation, microinjection of cells, or in vehicles such as liposomes, lipofectin, or as naked polynucleotides, or any other method described throughout the specification. The polynucleotide of the present invention may be delivered by known gene delivery systems such as, but not limited to, retroviral vectors (Gilboa, J. Virology 44:845 (1982); Hocke, Nature 320:275 (1986); Wilson, et al., Proc. Natl. Acad. Sci. U.S.A. 85:3014), vaccinia virus system (Chakrabarty et al., Mol. Cell Biol. 5:3403 (1985) or other efficient DNA delivery systems (Yates et al., Nature 313:812 (1985)) known to those skilled in the art. These references are exemplary only and are hereby incorporated by reference. In order to specifically deliver or transfect cells which are abnormally proliferating and spare non-dividing cells, it is preferable to utilize a retrovirus, or adenoviral (as described in the art and elsewhere herein) delivery system known to those of skill in the art. Since host DNA replication is required for retroviral DNA to integrate and the retrovirus will be unable to self replicate due to the lack of the retrovirus genes needed for its life cycle. Utilizing such a retroviral delivery system for polynucleotides of the present invention will target said gene and constructs to abnormally proliferating cells and will spare the non-dividing normal cells.

[0625] The polynucleotides of the present invention may be delivered directly to cell proliferative disorder/disease sites in internal organs, body cavities and the like by use of imaging devices used to guide an injecting needle directly to the disease site. The polynucleotides of the present invention may also be administered to disease sites at the time of surgical intervention.

[0626] By “cell proliferative disease” is meant any human or animal disease or disorder, affecting any one or any combination of organs, cavities, or body parts, which is characterized by single or multiple local abnormal proliferations of cells, groups of cells, or tissues, whether benign or malignant.

[0627] Any amount of the polynucleotides of the present invention may be administered as long as it has a biologically inhibiting effect on the proliferation of the treated cells. Moreover, it is possible to administer more than one of the polynucleotide of the present invention simultaneously to the same site. By “biologically inhibiting” is meant partial or total growth inhibition as well as decreases in the rate of proliferation or growth of the cells. The biologically inhibitory dose may be determined by assessing the effects of the polynucleotides of the present invention on target malignant or abnormally proliferating cell growth in tissue culture, tumor growth in animals and cell cultures, or any other method known to one of ordinary skill in the art.

[0628] The present invention is further directed to antibody-based therapies which involve administering of anti-polypeptides and anti-polynucleotide antibodies to a mammalian, preferably human, patient for treating one or more of the described diseases, disorders, and/or conditions. Methods for producing anti-polypeptides and anti-polynucleotide antibodies polyclonal and monoclonal antibodies are described in detail elsewhere herein. Such antibodies may be provided in pharmaceutically acceptable compositions as known in the art or as described herein.

[0629] A summary of the ways in which the antibodies of the present invention may be used therapeutically includes binding polynucleotides or polypeptides of the present invention locally or systemically in the body or by direct cytotoxicity of the antibody, e.g., as mediated by complement (CDC) or by effector cells (ADCC). Some of these approaches are described in more detail below. Armed with the teachings provided herein, one of ordinary skill in the art will know how to use the antibodies of the present invention for diagnostic, monitoring or therapeutic purposes without undue experimentation.

[0630] In particular, the antibodies, fragments and derivatives of the present invention are useful for treating a subject having or developing cell proliferative and/or differentiation diseases, disorders, and/or conditions as described herein. Such treatment comprises administering a single or multiple doses of the antibody, or a fragment, derivative, or a conjugate thereof.

[0631] The antibodies of this invention may be advantageously utilized in combination with other monoclonal or chimeric antibodies, or with lymphokines or hematopoietic growth factors, for example, which serve to increase the number or activity of effector cells which interact with the antibodies.

[0632] It is preferred to use high affinity and/or potent in vivo inhibiting and/or neutralizing antibodies against polypeptides or polynucleotides of the present invention, fragments or regions thereof, for both immunoassays directed to and therapy of diseases, disorders, and/or conditions related to polynucleotides or polypeptides, including fragments thereof, of the present invention. Such antibodies, fragments, or regions, will preferably have an affinity for polynucleotides or polypeptides, including fragments thereof. Preferred binding affinities include those with a dissociation constant or Kd less than 5×10⁻⁶ M, 10⁻⁶ M, 5×10⁻⁷ M, 10⁻⁷ M, 5×10⁻⁸ M, 10⁻⁸ M, 5×10⁻⁹ M, 10⁻⁹ M, 5×10⁻¹⁰ M, 10⁻¹⁰ M, 5×10⁻¹¹ M, 10⁻¹¹ M, 5×10⁻¹² M, 10⁻¹² M, 5×10⁻¹³ M, 10⁻¹³ M, 5×10⁻¹⁴ M, 10⁻¹⁴ M, 5×10⁻¹⁵ M, and 10⁻¹⁵ M.

[0633] Moreover, lung antigen polypeptides of the present invention or fragments thereof, are useful in inhibiting the angiogenesis of proliferative cells or tissues, either alone, as a protein fusion, or in combination with other polypeptides directly or indirectly, as described elsewhere herein. In a most preferred embodiment, said anti-angiogenesis effect may be achieved indirectly, for example, through the inhibition of hematopoietic, tumor-specific cells, such as tumor-associated macrophages (see, e.g., Joseph I B, et al. J Natl Cancer Inst, 90(21):1648-53 (1998), which is hereby incorporated by reference). Antibodies directed to polypeptides or polynucleotides of the present invention may also result in inhibition of angiogenesis directly, or indirectly (see, e.g., Witte L, et al., Cancer Metastasis Rev. 17(2):155-61 (1998), which is hereby incorporated by reference)).

[0634] Polypeptides, including protein fusions, of the present invention, or fragments thereof may be useful in inhibiting proliferative cells or tissues through the induction of apoptosis. Said polypeptides may act either directly, or indirectly to induce apoptosis of proliferative cells and tissues, for example in the activation of a death-domain receptor, such as tumor necrosis factor (TNF) receptor-1, CD95 (Fas/APO-1), TNF-receptor-related apoptosis-mediated protein (TRAMP) and TNF-related apoptosis-inducing ligand (TRAIL) receptor-1 and -2 (see, e.g., Schulze-Osthoff K, et. al., Eur J Biochem 254(3):439-59 (1998), which is hereby incorporated by reference). Moreover, in another preferred embodiment of the present invention, said polypeptides may induce apoptosis through other mechanisms, such as in the activation of other proteins which will activate apoptosis, or through stimulating the expression of said proteins, either alone or in combination with small molecule drugs or adjuvants, such as apoptonin, galectins, thioredoxins, antiinflammatory proteins (See for example, Mutat. Res. 400(1-2):447-55 (1998), Med Hypotheses.50(5):423-33 (1998), Chem. Biol. Interact. Apr 24; 111-112:23-34 (1998), J. Mo. Med. 76(6):402-12 (1998), Int. J. Tissue React. 20(1):3-15 (1998), which are all hereby incorporated by reference).

[0635] Polypeptides, including protein fusions to, or fragments thereof, of the present invention are useful in inhibiting the metastasis of proliferative cells or tissues. Inhibition may occur as a direct result of administering polypeptides, or antibodies directed to said polypeptides as described elsewhere herein, or indirectly, such as activating the expression of proteins known to inhibit metastasis, for example alpha 4 integrins, (See, e.g., Curr Top Microbiol Immunol 1998;231:125-41, which is hereby incorporated by reference). Such therapeutic affects of the present invention may be achieved either alone, or in combination with small molecule drugs or adjuvants.

[0636] In another embodiment, the invention provides a method of delivering compositions containing the polypeptides of the invention (e.g., compositions containing polypeptides or anti-lung antigen polypeptide antibodies associated with heterologous polypeptides, heterologous nucleic acids, toxins, or prodrugs) to targeted cells expressing the polypeptide of the present invention. lung antigen polypeptides or anti-lung antigen polypeptide antibodies of the invention may be associated with heterologous polypeptides, heterologous nucleic acids, toxins, or prodrugs via hydrophobic, hydrophilic, ionic and/or covalent interactions.

[0637] Polypeptides, protein fusions to, or fragments thereof, of the present invention are useful in enhancing the immunogenicity and/or antigenicity of proliferating cells or tissues, either directly, such as would occur if the polypeptides of the present invention ‘vaccinated’ the immune response to respond to proliferative antigens and immunogens, or indirectly, such as in activating the expression of proteins known to enhance the immune response (e.g. chemokines), to said antigens and immunogens.

[0638] Urinary System Disorders

[0639] Polynucleotides, polypeptides, antibodies, and/or agonists or antagonists of the present invention, may be used to treat, prevent, diagnose, and/or prognose disorders of the urinary system, including but not limited to disorders of the renal system, bladder, ureters, and urethra. Renal disorders include, but are not limited to, kidney failure, nephritis, blood vessel disorders of kidney, metabolic and congenital kidney disorders, urinary disorders of the kidney, autoimmune disorders, sclerosis and necrosis, electrolyte imbalance, and kidney cancers.

[0640] Kidney failure diseases include, but are not limited to, acute kidney failure, chronic kidney failure, atheroembolic renal failure, and end-stage renal disease. Inflammatory diseases of the kidney include acute glomerulonephritis, postinfectious glomerulonephritis, rapidly progressive glomerulonephritis, nephrotic syndrome, membranous glomerulonephritis, familial nephrotic syndrome, membranoproliferative glomerulonephritis I and II, mesangial proliferative glomerulonephritis, chronic glomerulonephritis, acute tubulointerstitial nephritis, chronic tubulointerstitial nephritis, acute post-streptococcal glomerulonephritis (PSGN), pyelonephritis, lupus nephritis, chronic nephritis, interstitial nephritis, and post-streptococcal glomerulonephritis.

[0641] Blood vessel disorders of the kidneys include, but are not limited to, kidney infarction, atheroembolic kidney disease, cortical necrosis, malignant nephrosclerosis, renal vein thrombosis, renal underperfusion, renal ischemia-reperfusion, renal artery embolism, and renal artery stenosis. Kidney disorders resulting form urinary tract problems include, but are not limited to, pyelonephritis, hydronephrosis, urolithiasis (renal lithiasis, nephrolithiasis), reflux nephropathy, urinary tract infections, urinary retention, and acute or chronic unilateral obstructive uropathy.

[0642] Metabolic and congenital disorders of the kidneys include, but are not limited to, renal tubular acidosis, renal glycosuria, nephrogenic diabetes insipidus, cystinuria, Fanconi's syndrome, vitamin D-resistant rickets, Hartnup disease, Bartter's syndrome, Liddle's syndrome, polycystic kidney disease, medullary cystic disease, medullary sponge kidney, Alport's syndrome, nail-patella syndrome, congenital nephrotic syndrome, CRUSH syndrome, horseshoe kidney, diabetic nephropathy, nephrogenic diabetes insipidus, analgesic nephropathy, kidney stones, and membranous nephropathy, Kidney disorders resulting from an autoimmune response include, but are not limited to, systemic lupus erythematosus (SLE), Goodpasture syndrome, IgA nephropathy, and IgM mesangial proliferative glomerulonephritis.

[0643] Sclerotic or necrotic disorders of the kidney include, but are not limited to, glomerulosclerosis, diabetic nephropathy, focal segmental glomerulosclerosis (FSGS), nectrotizing glomerulonephritis, and renal papillary necrosis. Kidneys may also develop carcinomas, including, but not limited to, hypernephroma, nephroblastoma, renal cell cancer, transitional cell cancer, squamous cell cancer, and Wilm's tumor.

[0644] Kidney disorders may also result in electrolyte imbalances, including, but not limited to, nephrocalcinosis, pyuria, edema, hydronephritis, proteinuria, hyponatremia, hypernatremia, hypokalemia, hyperkalemia, hypocalcemia, hypercalcemia, hypophosphatemia, and hyperphosphatemia.

[0645] Bladder disorders include, but are not limited to, benign prostatic hyperplasia (BPH), interstitial cystitis (IC), prostatitis, proteinuria, urinary tract infections, urinary incontinence, urinary retention. Disorders of the ureters and urethra include, but are not limited to, acute or chronic unilateral obstructive uropathy. The bladder, ureters, and urethra may also develop carcinomas, including, but not limited to, superficial bladder cancer, invasive bladder cancer, carcinoma of the ureter, and urethra cancers.

[0646] Polypeptides may be administered using any method known in the art, including, but not limited to, direct needle injection at the delivery site, intravenous injection, topical administration, catheter infusion, biolistic injectors, particle accelerators, gelfoam sponge depots, other commercially available depot materials, osmotic pumps, oral or suppositorial solid pharmaceutical formulations, decanting or topical applications during surgery, aerosol delivery. Such methods are known in the art. Polypeptides may be administered as part of a Therapeutic, described in more detail below. Methods of delivering polynucleotides are described in more detail herein.

[0647] Cardiovascular Disorders

[0648] Polynucleotides or polypeptides, or agonists or antagonists of the present invention, may be used to treat, prevent, diagnose, and/or prognose cardiovascular disorders, including, but not limited to, peripheral artery disease, such as limb ischemia.

[0649] Cardiovascular disorders include cardiovascular abnormalities, such as arterio-arterial fistula, arteriovenous fistula, cerebral arteriovenous malformations, congenital heart defects, pulmonary atresia, and Scimitar Syndrome. Congenital heart defects include aortic coarctation, cor triatriatum, coronary vessel anomalies, crisscross heart, dextrocardia, patent ductus arteriosus, Ebstein's anomaly, Eisenmenger complex, hypoplastic left heart syndrome, levocardia, tetralogy of fallot, transposition of great vessels, double outlet right ventricle, tricuspid atresia, persistent truncus arteriosus, total anomalous pulmonary venous connection, hypoplastic left heart syndrome, and heart septal defects, such as aortopulmonary septal defect, endocardial cushion defects, Lutembacher's Syndrome, atrioventricular canal defect, trilogy of Fallot, ventricular heart septal defects.

[0650] Cardiovascular disorders also include heart disease, such as arrhythmias, carcinoid heart disease, high cardiac output, low cardiac output, cardiac tamponade, endocarditis (including bacterial), heart aneurysm, cardiac arrest, sudden cardiac death, congestive heart failure, congestive cardiomyopathy, paroxysmal dyspnea, cardiac edema, heart hypertrophy, congestive cardiomyopathy, left ventricular hypertrophy, right ventricular hypertrophy, post-infarction heart rupture, ventricular septal rupture, heart valve diseases, myocardial diseases, myocardial ischemia, pericardial effusion, pericarditis (including constrictive and tuberculous), pneumopericardium, postpericardiotomy syndrome, pulmonary heart disease, rheumatic heart disease, ventricular dysfunction, hyperemia, cardiovascular pregnancy complications, Scimitar Syndrome, diastolic dysfunction, enlarged heart, heart block, J-curve phenomenon, rheumatic heart disease, Marfan syndrome, cardiovascular syphilis, and cardiovascular tuberculosis.

[0651] Arrhythmias include sinus arrhythmia, atrial fibrillation, atrial flutter, bradycardia, extrasystole, Adams-Stokes Syndrome, bundle-branch block, sinoatrial block, long QT syndrome, parasystole, Lown-Ganong-Levine Syndrome, Mahaim-type pre-excitation syndrome, Wolff-Parkinson-White syndrome, sick sinus syndrome, tachycardias, and ventricular fibrillation. Tachycardias include paroxysmal tachycardia, supraventricular tachycardia, accelerated idioventricular rhythm, atrioventricular nodal reentry tachycardia, ectopic atrial tachycardia, ectopic junctional tachycardia, sinoatrial nodal reentry tachycardia, sinus tachycardia, Torsades de Pointes, and ventricular tachycardia.

[0652] Heart valve disease include aortic valve insufficiency, aortic valve stenosis, heart murmurs, aortic valve prolapse, mitral valve prolapse, tricuspid valve prolapse, mitral valve insufficiency, mitral valve stenosis, pulmonary atresia, pulmonary valve insufficiency, pulmonary valve stenosis, tricuspid atresia, tricuspid valve insufficiency, tricuspid valve stenosis, and bicuspid aortic valve.

[0653] Myocardial diseases include alcoholic cardiomyopathy, congestive cardiomyopathy, hypertrophic cardiomyopathy, aortic subvalvular stenosis, pulmonary subvalvular stenosis, restrictive cardiomyopathy, Chagas cardiomyopathy, endocardial fibroelastosis, endomyocardial fibrosis, Kearns Syndrome, Barth syndrome, myocardial reperfusion injury, and myocarditis.

[0654] Myocardial ischemias include coronary disease, such as angina pectoris, Prinzmetal's angina, unstable angina, coronary aneurysm, coronary arteriosclerosis, coronary thrombosis, coronary vasospasm, myocardial infarction and myocardial stunning.

[0655] Cardiovascular diseases also include vascular diseases such as aneurysms, angiodysplasia, angiomatosis, bacillary angiomatosis, Hippel-Lindau Disease, Klippel-Trenaunay-Weber Syndrome, Sturge-Weber Syndrome, angioneurotic edema, aortic diseases, Takayasu's Arteritis, aortitis, Leriche's Syndrome, arterial occlusive diseases, arteritis, enarteritis, polyarteritis nodosa, cerebrovascular disorders, diabetic angiopathies, diabetic retinopathy, embolisms, thrombosis, erythromelalgia, hemorrhoids, hepatic veno-occlusive disease, hypertension, hypotension (shock), ischemia, peripheral vascular diseases, phlebitis, superficial phlebitis, pulmonary veno-occlusive disease, chronic obstructive pulmonary disease, Buerger's disease, Raynaud's disease, CREST syndrome, retinal vein occlusion, Scimitar syndrome, superior vena cava syndrome, telangiectasia, atacia telangiectasia, hereditary hemorrhagic telangiectasia, deep vein thrombosis, varicocele, varicose veins, varicose ulcer, vasculitis, and venous insufficiency.

[0656] Aneurysms include dissecting aneurysms, false aneurysms, infected aneurysms, ruptured aneurysms, aortic aneurysms, cerebral aneurysms, coronary aneurysms, heart aneurysms, and iliac aneurysms.

[0657] Arterial occlusive diseases include arteriosclerosis, arteriolosclerosis, atherosclerosis, intermittent claudication, carotid stenosis, fibromuscular dysplasias, mesenteric vascular occlusion, Moyamoya disease, renal artery obstruction, retinal artery occlusion, and thromboangiitis obliterans.

[0658] Cerebrovascular disorders include carotid artery diseases, cerebral amyloid angiopathy, cerebral aneurysm, cerebral anoxia, cerebral arteriosclerosis, cerebral arteriovenous malformation, cerebral artery diseases, cerebral embolism and thrombosis, carotid artery thrombosis, sinus thrombosis, Wallenberg's syndrome, cerebral hemorrhage, epidural hematoma, subdural hematoma, subaraxhnoid hemorrhage, cerebral infarction, cerebral ischemia (including transient), subclavian steal syndrome, periventricular leukomalacia, vascular headache, cluster headache, migraine, and vertebrobasilar insufficiency.

[0659] Embolisms include air embolisms, amniotic fluid embolisms, cholesterol embolisms, blue toe syndrome, fat embolisms, pulmonary embolisms, and thromoboembolisms. Thrombosis include coronary thrombosis, hepatic vein thrombosis, deep vein thrombosis, retinal vein occlusion, carotid artery thrombosis, sinus thrombosis, Wallenberg's syndrome, and thrombophlebitis.

[0660] Ischemia includes cerebral ischemia, ischemic colitis, silent ischemia, compartment syndromes, anterior compartment syndrome, myocardial ischemia, reperfusion injuries, and peripheral limb ischemia. Vasculitis includes aortitis, arteritis, Behcet's Syndrome, Churg-Strauss Syndrome, mucocutaneous lymph node syndrome, thromboangiitis obliterans, hypersensitivity vasculitis, Schoenlein-Henoch purpura, allergic cutaneous vasculitis, and Wegener's granulomatosis.

[0661] Cardiovascular diseases can also occur due to electrolyte imbalances that include, but are not limited to hyponatremia, hypernatremia, hypokalemia, hyperkalemia, hypocalcemia, hypercalcemia, hypophosphatemia, and hyperphophatemia. Neoplasm and/or cancers of the cardiovascular system include, but are not limited to, myxomas, fibromas, and rhabdomyomas.

[0662] Polypeptides may be administered using any method known in the art, including, but not limited to, direct needle injection at the delivery site, intravenous injection, topical administration, catheter infusion, biolistic injectors, particle accelerators, gelfoam sponge depots, other commercially available depot materials, osmotic pumps, oral or suppositorial solid pharmaceutical formulations, decanting or topical applications during surgery, aerosol delivery. Such methods are known in the art. Polypeptides may be administered as part of a Therapeutic, described in more detail below. Methods of delivering polynucleotides are described in more detail herein.

[0663] Anti-Angiogenesis Activity

[0664] The naturally occurring balance between endogenous stimulators and inhibitors of angiogenesis is one in which inhibitory influences predominate. Rastinejad et al., Cell 56:345-355 (1989). In those rare instances in which neovascularization occurs under normal physiological conditions, such as wound healing, organ regeneration, embryonic development, and female reproductive processes, angiogenesis is stringently regulated and spatially and temporally delimited. Under conditions of pathological angiogenesis such as that characterizing solid tumor growth, these regulatory controls fail. Unregulated angiogenesis becomes pathologic and sustains progression of many neoplastic and non-neoplastic diseases. A number of serious diseases are dominated by abnormal neovascularization including solid tumor growth and metastases, arthritis, some types of eye disorders, and psoriasis. See, e.g., reviews by Moses et al., Biotech. 9:630-634 (1991); Folkman et al, N. Engl. J. Med., 333:1757-1763 (1995); Auerbach et al., J. Microvasc. Res. 29:401-411 (1985); Folkman, Advances in Cancer Research, eds. Klein and Weinhouse, Academic Press, New York, pp. 175-203 (1985); Patz, Am. J. Opthalmol. 94:715-743 (1982); and Folkman et al., Science 221:719-725 (1983). In a number of pathological conditions, the process of angiogenesis contributes to the disease state. For example, significant data have accumulated which suggest that the growth of solid tumors is dependent on angiogenesis. Folkman and Klagsbrun, Science 235:442-447 (1987).

[0665] The present invention provides for treatment of diseases or disorders associated with neovascularization by administration of the polynucleotides and/or polypeptides of the invention, as well as agonists or antagonists of the present invention. Malignant and metastatic conditions which can be treated with the polynucleotides and polypeptides, or agonists or antagonists of the invention include, but are not limited to, malignancies, solid tumors, and cancers described herein and otherwise known in the art (for a review of such disorders, see Fishman et al., Medicine, 2d Ed., J. B. Lippincott Co., Philadelphia (1985)). Thus, the present invention provides a method of treating an angiogenesis-related disease and/or disorder, comprising administration to an individual in need thereof a therapeutically effective amount of a polynucleotide, polypeptide, antagonist and/or agonist of the invention. For example, polynucleotides, polypeptides, antagonists and/or agonists may be utilized in a variety of additional methods in order to therapeutically treat a cancer or tumor. Cancers which may be treated with polynucleotides, polypeptides, antagonists and/or agonists include, but are not limited to solid tumors, including prostate, lung, breast, ovarian, stomach, pancreas, larynx, esophagus, testes, liver, parotid, biliary tract, colon, rectum, cervix, uterus, endometrium, kidney, bladder, thyroid cancer; primary tumors and metastases; melanomas; glioblastoma; Kaposi's sarcoma; leiomyosarcoma; non-small cell lung cancer; colorectal cancer; advanced malignancies; and blood born tumors such as leukemias. For example, polynucleotides, polypeptides, antagonists and/or agonists may be delivered topically, in order to treat cancers such as skin cancer, head and neck tumors, breast tumors, and Kaposi's sarcoma.

[0666] Within yet other aspects, polynucleotides, polypeptides, antagonists and/or agonists may be utilized to treat superficial forms of bladder cancer by, for example, intravesical administration. Polynucleotides, polypeptides, antagonists and/or agonists may be delivered directly into the tumor, or near the tumor site, via injection or a catheter. Of course, as the artisan of ordinary skill will appreciate, the appropriate mode of administration will vary according to the cancer to be treated. Other modes of delivery are discussed herein.

[0667] Polynucleotides, polypeptides, antagonists and/or agonists may be useful in treating other disorders, besides cancers, which involve angiogenesis. These disorders include, but are not limited to: benign tumors, for example hemangiomas, acoustic neuromas, neurofibromas, trachomas, and pyogenic granulomas; artheroscleric plaques; ocular angiogenic diseases, for example, diabetic retinopathy, retinopathy of prematurity, macular degeneration, corneal graft rejection, neovascular glaucoma, retrolental fibroplasia, rubeosis, retinoblastoma, uvietis and Pterygia (abnormal blood vessel growth) of the eye; rheumatoid arthritis; psoriasis; delayed wound healing; endometriosis; vasculogenesis; granulations; hypertrophic scars (keloids); nonunion fractures; scleroderma; trachoma; vascular adhesions; myocardial angiogenesis; coronary collaterals; cerebral collaterals; arteriovenous malformations; ischemic limb angiogenesis; Osler-Webber Syndrome; plaque neovascularization; telangiectasia; hemophiliac joints; angiofibroma; fibromuscular dysplasia; wound granulation; Crohn's disease; and atherosclerosis.

[0668] For example, within one aspect of the present invention methods are provided for treating hypertrophic scars and keloids, comprising the step of administering a polynucleotide, polypeptide, antagonist and/or agonist of the invention to a hypertrophic scar or keloid.

[0669] Within one embodiment of the present invention polynucleotides, polypeptides, antagonists and/or agonists of the invention are directly injected into a hypertrophic scar or keloid, in order to prevent the progression of these lesions. This therapy is of particular value in the prophylactic treatment of conditions which are known to result in the development of hypertrophic scars and keloids (e.g., burns), and is preferably initiated after the proliferative phase has had time to progress (approximately 14 days after the initial injury), but before hypertrophic scar or keloid development. As noted above, the present invention also provides methods for treating neovascular diseases of the eye, including for example, corneal neovascularization, neovascular glaucoma, proliferative diabetic retinopathy, retrolental fibroplasia and macular degeneration.

[0670] Moreover, ocular disorders associated with neovascularization which can be treated with the polynucleotides and polypeptides of the present invention (including agonists and/or antagonists) include, but are not limited to: neovascular glaucoma, diabetic retinopathy, retinoblastoma, retrolental fibroplasia, uveitis, retinopathy of prematurity macular degeneration, corneal graft neovascularization, as well as other eye inflammatory diseases, ocular tumors and diseases associated with choroidal or iris neovascularization. See, e.g., reviews by Waltman et al., Am. J. Ophthal. 85:704-710 (1978) and Gartner et al., Surv. Ophthal. 22:291-312 (1978).

[0671] Thus, within one aspect of the present invention methods are provided for treating neovascular diseases of the eye such as corneal neovascularization (including corneal graft neovascularization), comprising the step of administering to a patient a therapeutically effective amount of a compound (as described above) to the cornea, such that the formation of blood vessels is inhibited. Briefly, the cornea is a tissue, which normally lacks blood vessels. In certain pathological conditions however, capillaries may extend into the cornea from the pericorneal vascular plexus of the limbus. When the cornea becomes vascularized, it also becomes clouded, resulting in a decline in the patient's visual acuity. Visual loss may become complete if the cornea completely opacitates. A wide variety of disorders can result in corneal neovascularization, including for example, corneal infections (e.g., trachoma, herpes simplex keratitis, leishmaniasis and onchocerciasis), immunological processes (e.g., graft rejection and Stevens-Johnson's syndrome), alkali burns, trauma, inflammation (of any cause), toxic and nutritional deficiency states, and as a complication of wearing contact lenses.

[0672] Within particularly preferred embodiments of the invention, may be prepared for topical administration in saline (combined with any of the preservatives and antimicrobial agents commonly used in ocular preparations), and administered in eyedrop form. The solution or suspension may be prepared in its pure form and administered several times daily. Alternatively, anti-angiogenic compositions, prepared as described above, may also be administered directly to the cornea. Within preferred embodiments, the anti-angiogenic composition is prepared with a muco-adhesive polymer, which binds to cornea. Within further embodiments, the anti-angiogenic factors or anti-angiogenic compositions may be utilized as an adjunct to conventional steroid therapy. Topical therapy may also be useful prophylactically in corneal lesions which are known to have a high probability of inducing an angiogenic response (such as chemical burns). In these instances the treatment, likely in combination with steroids, may be instituted immediately to help prevent subsequent complications.

[0673] Within other embodiments, the compounds described above may be injected directly into the corneal stroma by an ophthalmologist under microscopic guidance. The preferred site of injection may vary with the morphology of the individual lesion, but the goal of the administration would be to place the composition at the advancing front of the vasculature (i.e., interspersed between the blood vessels and the normal cornea). In most cases this would involve perilimbic corneal injection to “protect” the cornea from the advancing blood vessels. This method may also be utilized shortly after a corneal insult in order to prophylactically prevent corneal neovascularization. In this situation, the material could be injected in the perilimbic cornea interspersed between the corneal lesion and its undesired potential limbic blood supply. Such methods may also be utilized in a similar fashion to prevent capillary invasion of transplanted corneas. In a sustained-release form, injections might only be required 2-3 times per year. A steroid could also be added to the injection solution to reduce inflammation resulting from the injection itself.

[0674] Within another aspect of the present invention, methods are provided for treating neovascular glaucoma, comprising the step of administering to a patient a therapeutically effective amount of a polynucleotide, polypeptide, antagonist and/or agonist to the eye, such that the formation of blood vessels is inhibited. In one embodiment, the compound may be administered topically to the eye in order to treat early forms of neovascular glaucoma. Within other embodiments, the compound may be implanted by injection into the region of the anterior chamber angle. Within other embodiments, the compound may also be placed in any location such that the compound is continuously released into the aqueous humor. Within another aspect of the present invention, methods are provided for treating proliferative diabetic retinopathy, comprising the step of administering to a patient a therapeutically effective amount of a polynucleotide, polypeptide, antagonist and/or agonist to the eyes, such that the formation of blood vessels is inhibited.

[0675] Within particularly preferred embodiments of the invention, proliferative diabetic retinopathy may be treated by injection into the aqueous humor or the vitreous, in order to increase the local concentration of the polynucleotide, polypeptide, antagonist and/or agonist in the retina. Preferably, this treatment should be initiated prior to the acquisition of severe disease requiring photocoagulation.

[0676] Within another aspect of the present invention, methods are provided for treating retrolental fibroplasia, comprising the step of administering to a patient a therapeutically effective amount of a polynucleotide, polypeptide, antagonist and/or agonist to the eye, such that the formation of blood vessels is inhibited. The compound may be administered topically, via intravitreous injection and/or via intraocular implants.

[0677] Additionally, disorders which can be treated with the polynucleotides, polypeptides, agonists and/or agonists include, but are not limited to, hemangioma, arthritis, psoriasis, angiofibroma, atherosclerotic plaques, delayed wound healing, granulations, hemophilic joints, hypertrophic scars, nonunion fractures, Osler-Weber syndrome, pyogenic granuloma, scleroderma, trachoma, and vascular adhesions.

[0678] Moreover, disorders and/or states, which can be treated, prevented, diagnosed and/or prognosed with the polynucleotides, polypeptides, agonists and/or agonists of the invention include, but are not limited to, solid tumors, blood born tumors such as leukemias, tumor metastasis, Kaposi's sarcoma, benign tumors, for example hemangiomas, acoustic neuromas, neurofibromas, trachomas, and pyogenic granulomas, rheumatoid arthritis, psoriasis, ocular angiogenic diseases, for example, diabetic retinopathy, retinopathy of prematurity, macular degeneration, corneal graft rejection, neovascular glaucoma, retrolental fibroplasia, rubeosis, retinoblastoma, and uvietis, delayed wound healing, endometriosis, vasculogenesis, granulations, hypertrophic scars (keloids), nonunion fractures, scleroderma, trachoma, vascular adhesions, myocardial angiogenesis, coronary collaterals, cerebral collaterals, arteriovenous malformations, ischemic limb angiogenesis, Osler-Webber Syndrome, plaque neovascularization, telangiectasia, hemophiliac joints, angiofibroma fibromuscular dysplasia, wound granulation, Crohn's disease, atherosclerosis, birth control agent by preventing vascularization required for embryo implantation controlling menstruation, diseases that have angiogenesis as a pathologic consequence such as cat scratch disease (Rochele minalia quintosa), ulcers (Helicobacter pylori), Bartonellosis and bacillary angiomatosis.

[0679] In one aspect of the birth control method, an amount of the compound sufficient to block embryo implantation is administered before or after intercourse and fertilization have occurred, thus providing an effective method of birth control, possibly a “morning after” method. Polynucleotides, polypeptides, agonists and/or agonists may also be used in controlling menstruation or administered as either a peritoneal lavage fluid or for peritoneal implantation in the treatment of endometriosis.

[0680] Polynucleotides, polypeptides, agonists and/or agonists of the present invention may be incorporated into surgical sutures in order to prevent stitch granulomas.

[0681] Polynucleotides, polypeptides, agonists and/or agonists may be utilized in a wide variety of surgical procedures. For example, within one aspect of the present invention a compositions (in the form of, for example, a spray or film) may be utilized to coat or spray an area prior to removal of a tumor, in order to isolate normal surrounding tissues from malignant tissue, and/or to prevent the spread of disease to surrounding tissues. Within other aspects of the present invention, compositions (e.g., in the form of a spray) may be delivered via endoscopic procedures in order to coat tumors, or inhibit angiogenesis in a desired locale. Within yet other aspects of the present invention, surgical meshes, which have been coated with anti-angiogenic compositions of the present invention may be utilized in any procedure wherein a surgical mesh might be utilized. For example, within one embodiment of the invention a surgical mesh laden with an anti-angiogenic composition may be utilized during abdominal cancer resection surgery (e.g., subsequent to colon resection) in order to provide support to the structure, and to release an amount of the anti-angiogenic factor.

[0682] Within further aspects of the present invention, methods are provided for treating tumor excision sites, comprising administering a polynucleotide, polypeptide, agonist and/or agonist to the resection margins of a tumor subsequent to excision, such that the local recurrence of cancer and the formation of new blood vessels at the site is inhibited. Within one embodiment of the invention, the anti-angiogenic compound is administered directly to the tumor excision site (e.g., applied by swabbing, brushing or otherwise coating the resection margins of the tumor with the anti-angiogenic compound). Alternatively, the anti-angiogenic compounds may be incorporated into known surgical pastes prior to administration. Within particularly preferred embodiments of the invention, the anti-angiogenic compounds are applied after hepatic resections for malignancy, and after neurosurgical operations.

[0683] Within one aspect of the present invention, polynucleotides, polypeptides, agonists and/or agonists may be administered to the resection margin of a wide variety of tumors, including for example, breast, colon, brain and hepatic tumors. For example, within one embodiment of the invention, anti-angiogenic compounds may be administered to the site of a neurological tumor subsequent to excision, such that the formation of new blood vessels at the site are inhibited.

[0684] The polynucleotides, polypeptides, agonists and/or agonists of the present invention may also be administered along with other anti-angiogenic factors. Representative examples of other anti-angiogenic factors include: Anti-Invasive Factor, retinoic acid and derivatives thereof, paclitaxel, Suramin, Tissue Inhibitor of Metalloproteinase-1, Tissue Inhibitor of Metalloproteinase-2, Plasminogen Activator Inhibitor-1, Plasminogen Activator Inhibitor-2, and various forms of the lighter “d group” transition metals.

[0685] Lighter “d group” transition metals include, for example, vanadium, molybdenum, tungsten, titanium, niobium, and tantalum species. Such transition metal species may form transition metal complexes. Suitable complexes of the above-mentioned transition metal species include oxo transition metal complexes.

[0686] Representative examples of vanadium complexes include oxo vanadium complexes such as vanadate and vanadyl complexes. Suitable vanadate complexes include metavanadate and orthovanadate complexes such as, for example, ammonium metavanadate, sodium metavanadate, and sodium orthovanadate. Suitable vanadyl complexes include, for example, vanadyl acetylacetonate and vanadyl sulfate including vanadyl sulfate hydrates such as vanadyl sulfate mono- and trihydrates.

[0687] Representative examples of tungsten and molybdenum complexes also include oxo complexes. Suitable oxo tungsten complexes include tungstate and tungsten oxide complexes. Suitable tungstate complexes include ammonium tungstate, calcium tungstate, sodium tungstate dihydrate, and tungstic acid. Suitable tungsten oxides include tungsten (IV) oxide and tungsten (VI) oxide. Suitable oxo molybdenum complexes include molybdate, molybdenum oxide, and molybdenyl complexes. Suitable molybdate complexes include ammonium molybdate and its hydrates, sodium molybdate and its hydrates, and potassium molybdate and its hydrates. Suitable molybdenum oxides include molybdenum (VI) oxide, molybdenum (VI) oxide, and molybdic acid. Suitable molybdenyl complexes include, for example, molybdenyl acetylacetonate. Other suitable tungsten and molybdenum complexes include hydroxo derivatives derived from, for example, glycerol, tartaric acid, and sugars.

[0688] A wide variety of other anti-angiogenic factors may also be utilized within the context of the present invention. Representative examples include platelet factor 4; protamine sulphate; sulphated chitin derivatives (prepared from queen crab shells), (Murata et al., Cancer Res. 51:22-26 (1991)); Sulphated Polysaccharide Peptidoglycan Complex (SP-PG) (the function of this compound may be enhanced by the presence of steroids such as estrogen, and tamoxifen citrate); Staurosporine; modulators of matrix metabolism, including for example, proline analogs, cishydroxyproline, d,L-3,4-dehydroproline, Thiaproline, alpha,alpha-dipyridyl, aminopropionitrile fumarate; 4-propyl-5-(4-pyridinyl)-2(3H)-oxazolone; Methotrexate; Mitoxantrone; Heparin; Interferons; 2 Macroglobulin-serum; ChIMP-3 (Pavloff et al., J. Bio. Chem. 267:17321-17326 (1992)); Chymostatin (Tomkinson et al., Biochem J. 286:475-480 (1992)); Cyclodextrin Tetradecasulfate; Eponemycin; Camptothecin; Fumagillin (Ingber et al., Nature 348:555-557 (1990)); Gold Sodium Thiomalate (“GST”; Matsubara and Ziff, J. Clin. Invest. 79:1440-1446 (1987)); anticollagenase-serum; alpha2-antiplasmin (Holmes et al., J. Biol. Chem. 262(4):1659-1664 (1987)); Bisantrene (National Cancer Institute); Lobenzarit disodium (N-(2)-carboxyphenyl-4-chloroanthronilic acid disodium or “CCA”; Takeuchi et al., Agents Actions 36:312-316, 1992); Thalidomide; Angostatic steroid; AGM-1470; carboxynaminolmidazole; and metalloproteinase inhibitors such as BB94.

[0689] Musculoskeletal System Disorders

[0690] Polynucleotides, polypeptides, antibodies, and/or agonists or antagonists of the present invention, may be used to treat, prevent, diagnose, and/or prognose disorders of the musculoskeletal system, including but not limited to, disorders of the bone, joints, ligaments, tendons, bursa, muscle, and/or neoplasms and cancers associated with musculoskeletal tissue.

[0691] Diseases or disorders of the bone include, but are not limited to, Albers-Schönberg disease, bowlegs, heel spurs, Kohler's bone disease, knock-knees, Legg-Calvé-Perthes disease, Marfan's syndrome, mucopolysaccharidoses, Osgood-Schlatter disease, osteochondroses, osteochondrodysplasia, osteomyelitis, osteopetroses, osteoporosis (postmenopausal, senile, and juvenile), Paget's disease, Scheuermann's disease, scoliosis, Sever's disease, and patellofemoral stress syndrome.

[0692] Joint diseases or disorders include, but are not limited to, ankylosing spondylitis, Behcet's syndrome, CREST syndrome, Ehlers-Danlos syndrome, infectious arthritis, discoid lupus erythematosus, systemic lupus erythematosus, Lyme disease, osteoarthritis, psoriatic arthritis, relapsing polychondrites, Reiter's syndrome, rheumatoid arthritis (adult and juvenile), scleroderma, and Still's disease.

[0693] Diseases or disorders affecting ligaments, tendons, or bursa include, but are not limited to, ankle sprain, bursitis, posterior Achilles tendon bursitis (Haglund's deformity), anterior Achilles tendon bursitis (Albert's disease), tendinitis, tenosynovitis, poplieus tendinitis, Achilles tendinitis, medial or lateral epicondylitis, rotator cuff tendinitis, spasmodic torticollis, and fibromyalgia syndrome.

[0694] Muscle diseases or disorders include, but are not limited to, Becker's muscular dystrophy, Duchenne's muscular dystrophy, Landouzy-Dejerine muscular dystrophy, Leyden-Möbius muscular dystrophy, Erb's muscular dystrophy, Charcot's joints, dermatomyositis, gout, pseudogout, glycogen storage diseases, Pompe's disease, mitochondrial myopathy, periodic paralysis, polymyalgia rheumatica, polymyositis, Steinert's disease, Thomsen's disease, anterolateral and posteromedial shin splints, posterior femoral muscle strain, and fibromyositis.

[0695] Musculoskeletal tissue may also develop cancers and/or neoplasms that include, but are not limited to, osteochondroma, benign chondroma, chondroblastoma, chondromyxoid fibroma, osteoid osteoma, giant cell tumor, multiple myeloma, osteosarcoma, fibrosarcoma, malignant fibrous histiocytoma, chondrosarcoma, Ewing's tumor, and malignant lymphoma of bone.

[0696] Neural Activity and Neurological Diseases

[0697] The polynucleotides, polypeptides and agonists or antagonists of the invention may be used for the diagnosis and/or treatment of diseases, disorders, damage or injury of the brain and/or nervous system. Nervous system disorders that can be treated with the compositions of the invention (e.g., polypeptides, polynucleotides, and/or agonists or antagonists), include, but are not limited to, nervous system injuries, and diseases or disorders which result in either a disconnection of axons, a diminution or degeneration of neurons, or demyelination. Nervous system lesions which may be treated in a patient (including human and non-human mammalian patients) according to the methods of the invention, include but are not limited to, the following lesions of either the central (including spinal cord, brain) or peripheral nervous systems: (1) ischemic lesions, in which a lack of oxygen in a portion of the nervous system results in neuronal injury or death, including cerebral infarction or ischemia, or spinal cord infarction or ischemia; (2) traumatic lesions, including lesions caused by physical injury or associated with surgery, for example, lesions which sever a portion of the nervous system, or compression injuries; (3) malignant lesions, in which a portion of the nervous system is destroyed or injured by malignant tissue which is either a nervous system associated malignancy or a malignancy derived from non-nervous system tissue; (4) infectious lesions, in which a portion of the nervous system is destroyed or injured as a result of infection, for example, by an abscess or associated with infection by human immunodeficiency virus, herpes zoster, or herpes simplex virus or with Lyme disease, tuberculosis, or syphilis; (5) degenerative lesions, in which a portion of the nervous system is destroyed or injured as a result of a degenerative process including but not limited to, degeneration associated with Parkinson's disease, Alzheimer's disease, Huntington's chorea, or amyotrophic lateral sclerosis (ALS); (6) lesions associated with nutritional diseases or disorders, in which a portion of the nervous system is destroyed or injured by a nutritional disorder or disorder of metabolism including, but not limited to, vitamin B12 deficiency, folic acid deficiency, Wernicke disease, tobacco-alcohol amblyopia, Marchiafava-Bignami disease (primary degeneration of the corpus callosum), and alcoholic cerebellar degeneration; (7) neurological lesions associated with systemic diseases including, but not limited to, diabetes (diabetic neuropathy, Bell's palsy), systemic lupus erythematosus, carcinoma, or sarcoidosis; (8) lesions caused by toxic substances including alcohol, lead, or particular neurotoxins; and (9) demyelinated lesions in which a portion of the nervous system is destroyed or injured by a demyelinating disease including, but not limited to, multiple sclerosis, human immunodeficiency virus-associated myelopathy, transverse myelopathy or various etiologies, progressive multifocal leukoencephalopathy, and central pontine myelinolysis.

[0698] In one embodiment, the polypeptides, polynucleotides, or agonists or antagonists of the invention are used to protect neural cells from the damaging effects of hypoxia. In a further preferred embodiment, the polypeptides, polynucleotides, or agonists or antagonists of the invention are used to protect neural cells from the damaging effects of cerebral hypoxia. According to this embodiment, the compositions of the invention are used to treat or prevent neural cell injury associated with cerebral hypoxia. In one non-exclusive aspect of this embodiment, the polypeptides, polynucleotides, or agonists or antagonists of the invention, are used to treat or prevent neural cell injury associated with cerebral ischemia. In another non-exclusive aspect of this embodiment, the polypeptides, polynucleotides, or agonists or antagonists of the invention are used to treat or prevent neural cell injury associated with cerebral infarction.

[0699] In another preferred embodiment, the polypeptides, polynucleotides, or agonists or antagonists of the invention are used to treat or prevent neural cell injury associated with a stroke. In a specific embodiment, the polypeptides, polynucleotides, or agonists or antagonists of the invention are used to treat or prevent cerebral neural cell injury associated with a stroke.

[0700] In another preferred embodiment, the polypeptides, polynucleotides, or agonists or antagonists of the invention are used to treat or prevent neural cell injury associated with a heart attack. In a specific embodiment, the polypeptides, polynucleotides, or agonists or antagonists of the invention are used to treat or prevent cerebral neural cell injury associated with a heart attack.

[0701] The compositions of the invention which are useful for treating or preventing a nervous system disorder may be selected by testing for biological activity in promoting the survival or differentiation of neurons. For example, and not by way of limitation, compositions of the invention which elicit any of the following effects may be useful according to the invention: (1) increased survival time of neurons in culture either in the presence or absence of hypoxia or hypoxic conditions; (2) increased sprouting of neurons in culture or in vivo; (3) increased production of a neuron-associated molecule in culture or in vivo, e.g., choline acetyltransferase or acetylcholinesterase with respect to motor neurons; or (4) decreased symptoms of neuron dysfunction in vivo. Such effects may be measured by any method known in the art. In preferred, non-limiting embodiments, increased survival of neurons may routinely be measured using a method set forth herein or otherwise known in the art, such as, for example, in Zhang et al., Proc Natl Acad Sci USA 97:3637-42 (2000) or in Arakawa et al., J. Neurosci., 10:3507-15 (1990); increased sprouting of neurons may be detected by methods known in the art, such as, for example, the methods set forth in Pestronk et al., Exp. Neurol., 70:65-82 (1980), or Brown et al., Ann. Rev. Neurosci., 4:17-42 (1981); increased production of neuron-associated molecules may be measured by bioassay, enzymatic assay, antibody binding, Northern blot assay, etc., using techniques known in the art and depending on the molecule to be measured; and motor neuron dysfunction may be measured by assessing the physical manifestation of motor neuron disorder, e.g., weakness, motor neuron conduction velocity, or functional disability.

[0702] In specific embodiments, motor neuron disorders that may be treated according to the invention include, but are not limited to, disorders such as infarction, infection, exposure to toxin, trauma, surgical damage, degenerative disease or malignancy that may affect motor neurons as well as other components of the nervous system, as well as disorders that selectively affect neurons such as amyotrophic lateral sclerosis, and including, but not limited to, progressive spinal muscular atrophy, progressive bulbar palsy, primary lateral sclerosis, infantile and juvenile muscular atrophy, progressive bulbar paralysis of childhood (Fazio-Londe syndrome), poliomyelitis and the post polio syndrome, and Hereditary Motorsensory Neuropathy (Charcot-Marie-Tooth Disease).

[0703] Further, polypeptides or polynucleotides of the invention may play a role in neuronal survival; synapse formation; conductance; neural differentiation, etc. Thus, compositions of the invention (including polynucleotides, polypeptides, and agonists or antagonists) may be used to diagnose and/or treat or prevent diseases or disorders associated with these roles, including, but not limited to, learning and/or cognition disorders. The compositions of the invention may also be useful in the treatment or prevention of neurodegenerative disease states and/or behavioural disorders. Such neurodegenerative disease states and/or behavioral disorders include, but are not limited to, Alzheimer's Disease, Parkinson's Disease, Huntington's Disease, Tourette Syndrome, schizophrenia, mania, dementia, paranoia, obsessive compulsive disorder, panic disorder, learning disabilities, ALS, psychoses, autism, and altered behaviors, including disorders in feeding, sleep patterns, balance, and perception. In addition, compositions of the invention may also play a role in the treatment, prevention and/or detection of developmental disorders associated with the developing embryo, or sexually-linked disorders.

[0704] Additionally, polypeptides, polynucleotides and/or agonists or antagonists of the invention, may be useful in protecting neural cells from diseases, damage, disorders, or injury, associated with cerebrovascular disorders including, but not limited to, carotid artery diseases (e.g., carotid artery thrombosis, carotid stenosis, or Moyamoya Disease), cerebral amyloid angiopathy, cerebral aneurysm, cerebral anoxia, cerebral arteriosclerosis, cerebral arteriovenous malformations, cerebral artery diseases, cerebral embolism and thrombosis (e.g., carotid artery thrombosis, sinus thrombosis, or Wallenberg's Syndrome), cerebral hemorrhage (e.g., epidural or subdural hematoma, or subarachnoid hemorrhage), cerebral infarction, cerebral ischemia (e.g., transient cerebral ischemia, Subclavian Steal Syndrome, or vertebrobasilar insufficiency), vascular dementia (e.g., multi-infarct), leukomalacia, periventricular, and vascular headache (e.g., cluster headache or migraines).

[0705] In accordance with yet a further aspect of the present invention, there is provided a process for utilizing polynucleotides or polypeptides, as well as agonists or antagonists of the present invention, for therapeutic purposes, for example, to stimulate neurological cell proliferation and/or differentiation. Therefore, polynucleotides, polypeptides, agonists and/or antagonists of the invention may be used to treat and/or detect neurologic diseases. Moreover, polynucleotides or polypeptides, or agonists or antagonists of the invention, can be used as a marker or detector of a particular nervous system disease or disorder.

[0706] Examples of neurologic diseases which can be treated or detected with polynucleotides, polypeptides, agonists, and/or antagonists of the present invention include brain diseases, such as metabolic brain diseases which includes phenylketonuria such as maternal phenylketonuria, pyruvate carboxylase deficiency, pyruvate dehydrogenase complex deficiency, Wernicke's Encephalopathy, brain edema, brain neoplasms such as cerebellar neoplasms which include infratentorial neoplasms, cerebral ventricle neoplasms such as choroid plexus neoplasms, hypothalamic neoplasms, supratentorial neoplasms, canavan disease, cerebellar diseases such as cerebellar ataxia which include spinocerebellar degeneration such as ataxia telangiectasia, cerebellar dyssynergia, Friederich's Ataxia, Machado-Joseph Disease, olivopontocerebellar atrophy, cerebellar neoplasms such as infratentorial neoplasms, diffuse cerebral sclerosis such as encephalitis periaxialis, globoid cell leukodystrophy, metachromatic leukodystrophy and subacute sclerosing panencephalitis.

[0707] Additional neurologic diseases which can be treated or detected with polynucleotides, polypeptides, agonists, and/or antagonists of the present invention include cerebrovascular disorders (such as carotid artery diseases which include carotid artery thrombosis, carotid stenosis and Moyamoya Disease), cerebral amyloid angiopathy, cerebral aneurysm, cerebral anoxia, cerebral arteriosclerosis, cerebral arteriovenous malformations, cerebral artery diseases, cerebral embolism and thrombosis such as carotid artery thrombosis, sinus thrombosis and Wallenberg's Syndrome, cerebral hemorrhage such as epidural hematoma, subdural hematoma and subarachnoid hemorrhage, cerebral infarction, cerebral ischemia such as transient cerebral ischemia, Subclavian Steal Syndrome and vertebrobasilar insufficiency, vascular dementia such as multi-infarct dementia, periventricular leukomalacia, vascular headache such as cluster headache and migraine.

[0708] Additional neurologic diseases which can be treated or detected with polynucleotides, polypeptides, agonists, and/or antagonists of the present invention include dementia such as AIDS Dementia Complex, presenile dementia such as Alzheimer's Disease and Creutzfeldt-Jakob Syndrome, senile dementia such as Alzheimer's Disease and progressive supranuclear palsy, vascular dementia such as multi-infarct dementia, encephalitis which include encephalitis periaxialis, viral encephalitis such as epidemic encephalitis, Japanese Encephalitis, St. Louis Encephalitis, tick-borne encephalitis and West Nile Fever, acute disseminated encephalomyelitis, meningoencephalitis such as uveomeningoencephalitic syndrome, Postencephalitic Parkinson Disease and subacute sclerosing panencephalitis, encephalomalacia such as periventricular leukomalacia, epilepsy such as generalized epilepsy which includes infantile spasms, absence epilepsy, myoclonic epilepsy which includes MERRF Syndrome, tonic-clonic epilepsy, partial epilepsy such as complex partial epilepsy, frontal lobe epilepsy and temporal lobe epilepsy, post-traumatic epilepsy, status epilepticus such as Epilepsia Partialis Continua, and Hallervorden-Spatz Syndrome.

[0709] Additional neurologic diseases which can be treated or detected with polynucleotides, polypeptides, agonists, and/or antagonists of the present invention include hydrocephalus such as Dandy-Walker Syndrome and normal pressure hydrocephalus, hypothalamic diseases such as hypothalamic neoplasms; cerebral malaria, narcolepsy which includes cataplexy, bulbar poliomyelitis, cerebri pseudotumor, Rett Syndrome, Reye's Syndrome, thalamic diseases, cerebral toxoplasmosis, intracranial tuberculoma and Zellweger Syndrome, central nervous system infections such as AIDS Dementia Complex, Brain Abscess, subdural empyema, encephalomyelitis such as Equine Encephalomyelitis, Venezuelan Equine Encephalomyelitis, Necrotizing Hemorrhagic Encephalomyelitis, Visna, and cerebral malaria.

[0710] Additional neurologic diseases which can be treated or detected with polynucleotides, polypeptides, agonists, and/or antagonists of the present invention include meningitis such as arachnoiditis, aseptic meningtitis such as viral meningtitis which includes lymphocytic choriomeningitis, Bacterial meningtitis which includes Haemophilus Meningtitis, Listeria Meningtitis, Meningococcal Meningtitis such as Waterhouse-Friderichsen Syndrome, Pneumococcal Meningtitis and meningeal tuberculosis, fungal meningitis such as Cryptococcal Meningtitis, subdural effusion, meningoencephalitis such as uvemeningoencephalitic syndrome, myelitis such as transverse myelitis, neurosyphilis such as tabes dorsalis, poliomyelitis which includes bulbar poliomyelitis and postpoliomyelitis syndrome, prion diseases (such as Creutzfeldt-Jakob Syndrome, Bovine Spongiform Encephalopathy, Gerstmann-Straussler Syndrome, Kuru, Scrapie), and cerebral toxoplasmosis.

[0711] Additional neurologic diseases which can be treated or detected with polynucleotides, polypeptides, agonists, and/or antagonists of the present invention include central nervous system neoplasms such as brain neoplasms that include cerebellar neoplasms such as infratentorial neoplasms, cerebral ventricle neoplasms such as choroid plexus neoplasms, hypothalamic neoplasms and supratentorial neoplasms, meningeal neoplasms, spinal cord neoplasms which include epidural neoplasms, demyelinating diseases such as Canavan Diseases, diffuse cerebral sceloris which includes adrenoleukodystrophy, encephalitis periaxialis, globoid cell leukodystrophy, diffuse cerebral sclerosis such as metachromatic leukodystrophy, allergic encephalomyelitis, necrotizing hemorrhagic encephalomyelitis, progressive multifocal leukoencephalopathy, multiple sclerosis, central pontine myelinolysis, transverse myelitis, neuromyelitis optica, Scrapie, Swayback, Chronic Fatigue Syndrome, Visna, High Pressure Nervous Syndrome, Meningism, spinal cord diseases such as amyotonia congenita, amyotrophic lateral sclerosis, spinal muscular atrophy such as Werdnig-Hoffmann Disease, spinal cord compression, spinal cord neoplasms such as epidural neoplasms, syringomyelia, Tabes Dorsalis, Stiff-Man Syndrome, mental retardation such as Angelman Syndrome, Cri-du-Chat Syndrome, De Lange's Syndrome, Down Syndrome, Gangliosidoses such as gangliosidoses G(M1), Sandhoff Disease, Tay-Sachs Disease, Hartnup Disease, homocystinuria, Laurence-Moon-Biedl Syndrome, Lesch-Nyhan Syndrome, Maple Syrup Urine Disease, mucolipidosis such as fucosidosis, neuronal ceroid-lipofuscinosis, oculocerebrorenal syndrome, phenylketonuria such as maternal phenylketonuria, Prader-Willi Syndrome, Rett Syndrome, Rubinstein-Taybi Syndrome, Tuberous Sclerosis, WAGR Syndrome, nervous system abnormalities such as holoprosencephaly, neural tube defects such as anencephaly which includes hydrangencephaly, Arnold-Chairi Deformity, encephalocele, meningocele, meningomyelocele, spinal dysraphism such as spina bifida cystica and spina bifida occulta.

[0712] Additional neurologic diseases which can be treated or detected with polynucleotides, polypeptides, agonists, and/or antagonists of the present invention include hereditary motor and sensory neuropathies which include Charcot-Marie Disease, Hereditary optic atrophy, Refsum's Disease, hereditary spastic paraplegia, Werdnig-Hoffmann Disease, Hereditary Sensory and Autonomic Neuropathies such as Congenital Analgesia and Familial Dysautonomia, Neurologic manifestations (such as agnosia that include Gerstmann's Syndrome, Amnesia such as retrograde amnesia, apraxia, neurogenic bladder, cataplexy, communicative disorders such as hearing disorders that includes deafness, partial hearing loss, loudness recruitment and tinnitus, language disorders such as aphasia which include agraphia, anomia, broca aphasia, and Wernicke Aphasia, Dyslexia such as Acquired Dyslexia, language development disorders, speech disorders such as aphasia which includes anomia, broca aphasia and Wernicke Aphasia, articulation disorders, communicative disorders such as speech disorders which include dysarthria, echolalia, mutism and stuttering, voice disorders such as aphonia and hoarseness, decerebrate state, delirium, fasciculation, hallucinations, meningism, movement disorders such as angelman syndrome, ataxia, athetosis, chorea, dystonia, hypokinesia, muscle hypotonia, myoclonus, tic, torticollis and tremor, muscle hypertonia such as muscle rigidity such as stiff-man syndrome, muscle spasticity, paralysis such as facial paralysis which includes Herpes Zoster Oticus, Gastroparesis, Hemiplegia, ophthalmoplegia such as diplopia, Duane's Syndrome, Horner's Syndrome, Chronic progressive external ophthalmoplegia such as Kearns Syndrome, Bulbar Paralysis, Tropical Spastic Paraparesis, Paraplegia such as Brown-Sequard Syndrome, quadriplegia, respiratory paralysis and vocal cord paralysis, paresis, phantom limb, taste disorders such as ageusia and dysgeusia, vision disorders such as amblyopia, blindness, color vision defects, diplopia, hemianopsia, scotoma and subnormal vision, sleep disorders such as hypersomnia which includes Kleine-Levin Syndrome, insomnia, and somnambulism, spasm such as trismus, unconsciousness such as coma, persistent vegetative state and syncope and vertigo, neuromuscular diseases such as amyotonia congenita, amyotrophic lateral sclerosis, Lambert-Eaton Myasthenic Syndrome, motor neuron disease, muscular atrophy such as spinal muscular atrophy, Charcot-Marie Disease and Werdnig-Hoffmann Disease, Postpoliomyelitis Syndrome, Muscular Dystrophy, Myasthenia Gravis, Myotonia Atrophica, Myotonia Confenita, Nemaline Myopathy, Familial Periodic Paralysis, Multiplex Paramyloclonus, Tropical Spastic Paraparesis and Stiff-Man Syndrome, peripheral nervous system diseases such as acrodynia, amyloid neuropathies, autonomic nervous system diseases such as Adie's Syndrome, Barre-Lieou Syndrome, Familial Dysautonomia, Horner's Syndrome, Reflex Sympathetic Dystrophy and Shy-Drager Syndrome, Cranial Nerve Diseases such as Acoustic Nerve Diseases such as Acoustic Neuroma which includes Neurofibromatosis 2, Facial Nerve Diseases such as Facial Neuralgia, Melkersson-Rosenthal Syndrome, ocular motility disorders which includes amblyopia, nystagmus, oculomotor nerve paralysis, ophthalmoplegia such as Duane's Syndrome, Horner's Syndrome, Chronic Progressive External Ophthalmoplegia which includes Kearns Syndrome, Strabismus such as Esotropia and Exotropia, Oculomotor Nerve Paralysis, Optic Nerve Diseases such as Optic Atrophy which includes Hereditary Optic Atrophy, Optic Disk Drusen, Optic Neuritis such as Neuromyelitis Optica, Papilledema, Trigeminal Neuralgia, Vocal Cord Paralysis, Demyelinating Diseases such as Neuromyelitis Optica and Swayback, and Diabetic neuropathies such as diabetic foot.

[0713] Additional neurologic diseases which can be treated or detected with polynucleotides, polypeptides, agonists, and/or antagonists of the present invention include nerve compression syndromes such as carpal tunnel syndrome, tarsal tunnel syndrome, thoracic outlet syndrome such as cervical rib syndrome, ulnar nerve compression syndrome, neuralgia such as causalgia, cervico-brachial neuralgia, facial neuralgia and trigeminal neuralgia, neuritis such as experimental allergic neuritis, optic neuritis, polyneuritis, polyradiculoneuritis and radiculities such as polyradiculitis, hereditary motor and sensory neuropathies such as Charcot-Marie Disease, Hereditary Optic Atrophy, Refsum's Disease, Hereditary Spastic Paraplegia and Werdnig-Hoffmann Disease, Hereditary Sensory and Autonomic Neuropathies which include Congenital Analgesia and Familial Dysautonomia, POEMS Syndrome, Sciatica, Gustatory Sweating and Tetany).

[0714] Endocrine Disorders

[0715] Polynucleotides or polypeptides, or agonists or antagonists of the present invention, may be used to treat, prevent, diagnose, and/or prognose disorders and/or diseases related to hormone imbalance, and/or disorders or diseases of the endocrine system.

[0716] Hormones secreted by the glands of the endocrine system control physical growth, sexual function, metabolism, and other functions. Disorders may be classified in two ways: disturbances in the production of hormones, and the inability of tissues to respond to hormones. The etiology of these hormone imbalance or endocrine system diseases, disorders or conditions may be genetic, somatic, such as cancer and some autoimmune diseases, acquired (e.g., by chemotherapy, injury or toxins), or infectious. Moreover, polynucleotides, polypeptides, antibodies, and/or agonists or antagonists of the present invention can be used as a marker or detector of a particular disease or disorder related to the endocrine system and/or hormone imbalance.

[0717] Endocrine system and/or hormone imbalance and/or diseases encompass disorders of uterine motility including, but not limited to: complications with pregnancy and labor (e.g., pre-term labor, post-term pregnancy, spontaneous abortion, and slow or stopped labor); and disorders and/or diseases of the menstrual cycle (e.g., dysmenorrhea and endometriosis).

[0718] Endocrine system and/or hormone imbalance disorders and/or diseases include disorders and/or diseases of the pancreas, such as, for example, diabetes mellitus, diabetes insipidus, congenital pancreatic agenesis, pheochromocytoma—islet cell tumor syndrome; disorders and/or diseases of the adrenal glands such as, for example, Addison's Disease, corticosteroid deficiency, virilizing disease, hirsutism, Cushing's Syndrome, hyperaldosteronism, pheochromocytoma; disorders and/or diseases of the pituitary gland, such as, for example, hyperpituitarism, hypopituitarism, pituitary dwarfism, pituitary adenoma, panhypopituitarism, acromegaly, gigantism; disorders and/or diseases of the thyroid, including but not limited to, hyperthyroidism, hypothyroidism, Plummer's disease, Graves' disease (toxic diffuse goiter), toxic nodular goiter, thyroiditis (Hashimoto's thyroiditis, subacute granulomatous thyroiditis, and silent lymphocytic thyroiditis), Pendred's syndrome, myxedema, cretinism, thyrotoxicosis, thyroid hormone coupling defect, thymic aplasia, Hurthle cell tumours of the thyroid, thyroid cancer, thyroid carcinoma, Medullary thyroid carcinoma; disorders and/or diseases of the parathyroid, such as, for example, hyperparathyroidism, hypoparathyroidism; disorders and/or diseases of the hypothalamus.

[0719] In addition, endocrine system and/or hormone imbalance disorders and/or diseases may also include disorders and/or diseases of the testes or ovaries, including cancer. Other disorders and/or diseases of the testes or ovaries further include, for example, ovarian cancer, polycystic ovary syndrome, Klinefelter's syndrome, vanishing testes syndrome (bilateral anorchia), congenital absence of Leydig's cells, cryptorchidism, Noonan's syndrome, myotonic dystrophy, capillary haemangioma of the testis (benign), neoplasias of the testis and neo-testis.

[0720] Moreover, endocrine system and/or hormone imbalance disorders and/or diseases may also include disorders and/or diseases such as, for example, polyglandular deficiency syndromes, pheochromocytoma, neuroblastoma, multiple Endocrine neoplasia, and disorders and/or cancers of endocrine tissues.

[0721] In another embodiment, a polypeptide of the invention, or polynucleotides, antibodies, agonists, or antagonists corresponding to that polypeptide, may be used to diagnose, prognose, prevent, and/or treat endocrine diseases and/or disorders associated with the tissue(s) in which the polypeptide of the invention is expressed, including one, two, three, four, five, or more tissues disclosed in Table 1A, column 7 (Tissue Distribution Library Code).

[0722] Gastrointestinal Disorders

[0723] Polynucleotides or polypeptides, or agonists or antagonists of the present invention, may be used to treat, prevent, diagnose, and/or prognose gastrointestinal disorders, including inflammatory diseases and/or conditions, infections, cancers (e.g., intestinal neoplasms (carcinoid tumor of the small intestine, non-Hodgkin's lymphoma of the small intestine, small bowl lymphoma)), and ulcers, such as peptic ulcers.

[0724] Gastrointestinal disorders include dysphagia, odynophagia, inflammation of the esophagus, peptic esophagitis, gastric reflux, submucosal fibrosis and stricturing, Mallory-Weiss lesions, leiomyomas, lipomas, epidermal cancers, adeoncarcinomas, gastric retention disorders, gastroenteritis, gastric atrophy, gastric/stomach cancers, polyps of the stomach, autoimmune disorders such as pernicious anemia, pyloric stenosis, gastritis (bacterial, viral, eosinophilic, stress-induced, chronic erosive, atrophic, plasma cell, and Menetrier's), and peritoneal diseases (e.g., chyloperioneum, hemoperitoneum, mesenteric cyst, mesenteric lymphadenitis, mesenteric vascular occlusion, panniculitis, neoplasms, peritonitis, pneumoperitoneum, bubphrenic abscess).

[0725] Gastrointestinal disorders also include disorders associated with the small intestine, such as malabsorption syndromes, distension, irritable bowel syndrome, sugar intolerance, celiac disease, duodenal ulcers, duodenitis, tropical sprue, Whipple's disease, intestinal lymphangiectasia, Crohn's disease, appendicitis, obstructions of the ileum, Meckel's diverticulum, multiple diverticula, failure of complete rotation of the small and large intestine, lymphoma, and bacterial and parasitic diseases (such as Traveler's diarrhea, typhoid and paratyphoid, cholera, infection by Roundworms (Ascariasis lumbricoides), Hookworms (Ancylostoma duodenale), Threadworms (Enterobius vermicularis), Tapeworms (Taenia saginata, Echinococcus granulosus, Diphyllobothrium spp., and T. solium).

[0726] Liver diseases and/or disorders include intrahepatic cholestasis (alagille syndrome, biliary liver cirrhosis), fatty liver (alcoholic fatty liver, reye syndrome), hepatic vein thrombosis, hepatolentricular degeneration, hepatomegaly, hepatopulmonary syndrome, hepatorenal syndrome, portal hypertension (esophageal and gastric varices), liver abscess (amebic liver abscess), liver cirrhosis (alcoholic, biliary and experimental), alcoholic liver diseases (fatty liver, hepatitis, cirrhosis), parasitic (hepatic echinococcosis, fascioliasis, amebic liver abscess), jaundice (hemolytic, hepatocellular, and cholestatic), cholestasis, portal hypertension, liver enlargement, ascites, hepatitis (alcoholic hepatitis, animal hepatitis, chronic hepatitis (autoimmune, hepatitis B, hepatitis C, hepatitis D, drug induced), toxic hepatitis, viral human hepatitis (hepatitis A, hepatitis B, hepatitis C, hepatitis D, hepatitis E), Wilson's disease, granulomatous hepatitis, secondary biliary cirrhosis, hepatic encephalopathy, portal hypertension, varices, hepatic encephalopathy, primary biliary cirrhosis, primary sclerosing cholangitis, hepatocellular adenoma, hemangiomas, bile stones, liver failure (hepatic encephalopathy, acute liver failure), and liver neoplasms (angiomyolipoma, calcified liver metastases, cystic liver metastases, epithelial tumors, fibrolamellar hepatocarcinoma, focal nodular hyperplasia, hepatic adenoma, hepatobiliary cystadenoma, hepatoblastoma, hepatocellular carcinoma, hepatoma, liver cancer, liver hemangioendothelioma, mesenchymal hamartoma, mesenchymal tumors of liver, nodular regenerative hyperplasia, benign liver tumors (Hepatic cysts [Simple cysts, Polycystic liver disease, Hepatobiliary cystadenoma, Choledochal cyst], Mesenchymal tumors [Mesenchymal hamartoma, Infantile hemangioendothelioma, Hemangioma, Peliosis hepatis, Lipomas, Inflammatory pseudotumor, Miscellaneous], Epithelial tumors [Bile duct epithelium (Bile duct hamartoma, Bile duct adenoma), Hepatocyte (Adenoma, Focal nodular hyperplasia, Nodular regenerative hyperplasia)], malignant liver tumors [hepatocellular, hepatoblastoma, hepatocellular carcinoma, cholangiocellular, cholangiocarcinoma, cystadenocarcinoma, tumors of blood vessels, angiosarcoma, Karposi's sarcoma, hemangioendothelioma, other tumors, embryonal sarcoma, fibrosarcoma, leiomyosarcoma, rhabdomyosarcoma, carcinosarcoma, teratoma, carcinoid, squamous carcinoma, primary lymphoma]), peliosis hepatis, erythrohepatic porphyria, hepatic porphyria (acute intermittent porphyria, porphyria cutanea tarda), Zellweger syndrome).

[0727] Pancreatic diseases and/or disorders include acute pancreatitis, chronic pancreatitis (acute necrotizing pancreatitis, alcoholic pancreatitis), neoplasms (adenocarcinoma of the pancreas, cystadenocarcinoma, insulinoma, gastrinoma, and glucagonoma, cystic neoplasms, islet-cell tumors, pancreoblastoma), and other pancreatic diseases (e.g., cystic fibrosis, cyst (pancreatic pseudocyst, pancreatic fistula, insufficiency)).

[0728] Gallbladder diseases include gallstones (cholelithiasis and choledocholithiasis), postcholecystectomy syndrome, diverticulosis of the gallbladder, acute cholecystitis, chronic cholecystitis, bile duct tumors, and mucocele.

[0729] Diseases and/or disorders of the large intestine include antibiotic-associated colitis, diverticulitis, ulcerative colitis, acquired megacolon, abscesses, fungal and bacterial infections, anorectal disorders (e.g., fissures, hemorrhoids), colonic diseases (colitis, colonic neoplasms [colon cancer, adenomatous colon polyps (e.g., villous adenoma), colon carcinoma, colorectal cancer], colonic diverticulitis, colonic diverticulosis, megacolon [Hirschsprung disease, toxic megacolon]; sigmoid diseases [proctocolitis, sigmoin neoplasms]), constipation, Crohn's disease, diarrhea (infantile diarrhea, dysentery), duodenal diseases (duodenal neoplasms, duodenal obstruction, duodenal ulcer, duodenitis), enteritis (enterocolitis), HIV enteropathy, ileal diseases (ileal neoplasms, ileitis), immunoproliferative small intestinal disease, inflammatory bowel disease (ulcerative colitis, Crohn's disease), intestinal atresia, parasitic diseases (anisakiasis, balantidiasis, blastocystis infections, cryptosporidiosis, dientamoebiasis, amebic dysentery, giardiasis), intestinal fistula (rectal fistula), intestinal neoplasms (cecal neoplasms, colonic neoplasms, duodenal neoplasms, ileal neoplasms, intestinal polyps, jejunal neoplasms, rectal neoplasms), intestinal obstruction (afferent loop syndrome, duodenal obstruction, impacted feces, intestinal pseudo-obstruction [cecal volvulus], intussusception), intestinal perforation, intestinal polyps (colonic polyps, gardner syndrome, peutz-jeghers syndrome), jejunal diseases (jejunal neoplasms), malabsorption syndromes (blind loop syndrome, celiac disease, lactose intolerance, short bowl syndrome, tropical sprue, whipple's disease), mesenteric vascular occlusion, pneumatosis cystoides intestinalis, protein-losing enteropathies (intestinal lymphagiectasis), rectal diseases (anus diseases, fecal incontinence, hemorrhoids, proctitis, rectal fistula, rectal prolapse, rectocele), peptic ulcer (duodenal ulcer, peptic esophagitis, hemorrhage, perforation, stomach ulcer, Zollinger-Ellison syndrome), postgastrectomy syndromes (dumping syndrome), stomach diseases (e.g., achlorhydria, duodenogastric reflux (bile reflux), gastric antral vascular ectasia, gastric fistula, gastric outlet obstruction, gastritis (atrophic or hypertrophic), gastroparesis, stomach dilatation, stomach diverticulum, stomach neoplasms (gastric cancer, gastric polyps, gastric adenocarcinoma, hyperplastic gastric polyp), stomach rupture, stomach ulcer, stomach volvulus), tuberculosis, visceroptosis, vomiting (e.g., hematemesis, hyperemesis gravidarum, postoperative nausea and vomiting) and hemorrhagic colitis.

[0730] Further diseases and/or disorders of the gastrointestinal system include biliary tract diseases, such as, gastroschisis, fistula (e.g., biliary fistula, esophageal fistula, gastric fistula, intestinal fistula, pancreatic fistula), neoplasms (e.g., biliary tract neoplasms, esophageal neoplasms, such as adenocarcinoma of the esophagus, esophageal squamous cell carcinoma, gastrointestinal neoplasms, pancreatic neoplasms, such as adenocarcinoma of the pancreas, mucinous cystic neoplasm of the pancreas, pancreatic cystic neoplasms, pancreatoblastoma, and peritoneal neoplasms), esophageal disease (e.g., bullous diseases, candidiasis, glycogenic acanthosis, ulceration, barrett esophagus varices, atresia, cyst, diverticulum (e.g., Zenker's diverticulum), fistula (e.g., tracheoesophageal fistula), motility disorders (e.g., CREST syndrome, deglutition disorders, achalasia, spasm, gastroesophageal reflux), neoplasms, perforation (e.g., Boerhaave syndrome, Mallory-Weiss syndrome), stenosis, esophagitis, diaphragmatic hernia (e.g., hiatal hernia); gastrointestinal diseases, such as, gastroenteritis (e.g., cholera morbus, norwalk virus infection), hemorrhage (e.g., hematemesis, melena, peptic ulcer hemorrhage), stomach neoplasms (gastric cancer, gastric polyps, gastric adenocarcinoma, stomach cancer)), hernia (e.g., congenital diaphragmatic hernia, femoral hernia, inguinal hernia, obturator hernia, umbilical hernia, ventral hernia), and intestinal diseases (e.g., cecal diseases (appendicitis, cecal neoplasms)).

[0731] Reproductive System Disorders

[0732] The polynucleotides or polypeptides, or agonists or antagonists of the invention may be used for the diagnosis, treatment, or prevention of diseases and/or disorders of the reproductive system. Reproductive system disorders that can be treated by the compositions of the invention, include, but are not limited to, reproductive system injuries, infections, neoplastic disorders, congenital defects, and diseases or disorders which result in infertility, complications with pregnancy, labor, or parturition, and postpartum difficulties.

[0733] Reproductive system disorders and/or diseases include diseases and/or disorders of the testes, including, but not limited to, testicular atrophy, testicular feminization, cryptorchism (unilateral and bilateral), anorchia, ectopic testis, epididymitis and orchitis (typically resulting from infections such as, for example, gonorrhea, mumps, tuberculosis, and syphilis), testicular torsion, vasitis nodosa, germ cell tumors (e.g., seminomas, embryonal cell carcinomas, teratocarcinomas, choriocarcinomas, yolk sac tumors, and teratomas), stromal tumors (e.g., Leydig cell tumors), hydrocele, hematocele, varicocele, spermatocele, inguinal hernia, and disorders of sperm production (e.g., immotile cilia syndrome, aspermia, asthenozoospermia, azoospermia, oligospermia, and teratozoospermia).

[0734] Reproductive system disorders also include, but are not limited to, disorders of the prostate gland, such as acute non-bacterial prostatitis, chronic non-bacterial prostatitis, acute bacterial prostatitis, chronic bacterial prostatitis, prostatodystonia, prostatosis, granulomatous prostatitis, malacoplakia, benign prostatic hypertrophy or hyperplasia, and prostate neoplastic disorders, including adenocarcinomas, transitional cell carcinomas, ductal carcinomas, and squamous cell carcinomas.

[0735] Additionally, the compositions of the invention may be useful in the diagnosis, treatment, and/or prevention of disorders or diseases of the penis and urethra, including, but not limited to, inflammatory disorders, such as balanoposthitis, balanitis xerotica obliterans, phimosis, paraphimosis, syphilis, herpes simplex virus, gonorrhea, non-gonococcal urethritis, chlamydia, mycoplasma, trichomonas, HIV, AIDS, Reiter's syndrome, condyloma acuminatum, condyloma latum, and pearly penile papules; urethral abnormalities, such as hypospadias, epispadias, and phimosis; premalignant lesions, including Erythroplasia of Queyrat, Bowen's disease, Bowenoid paplosis, giant condyloma of Buscke-Lowenstein, and varrucous carcinoma; penile cancers, including squamous cell carcinomas, carcinoma in situ, verrucous carcinoma, and disseminated penile carcinoma; urethral neoplastic disorders, including penile urethral carcinoma, bulbomembranous urethral carcinoma, and prostatic urethral carcinoma; and erectile disorders, such as priapism, Peyronie's disease, erectile dysfunction, and impotence.

[0736] Moreover, diseases and/or disorders of the vas deferens include, but are not limited to, vasculititis and CBAVD (congenital bilateral absence of the vas deferens); additionally, the polynucleotides, polypeptides, and agonists or antagonists of the present invention may be used in the diagnosis, treatment, and/or prevention of diseases and/or disorders of the seminal vesicles, including but not limited to, hydatid disease, congenital chloride diarrhea, and polycystic kidney disease.

[0737] Other disorders and/or diseases of the male reproductive system that may be diagnosed, treated, and/or prevented with the compositions of the invention include, but are not limited to, Klinefelter's syndrome, Young's syndrome, premature ejaculation, diabetes mellitus, cystic fibrosis, Kartagener's syndrome, high fever, multiple sclerosis, and gynecomastia.

[0738] Further, the polynucleotides, polypeptides, and agonists or antagonists of the present invention may be used in the diagnosis, treatment, and/or prevention of diseases and/or disorders of the vagina and vulva, including, but not limited to, bacterial vaginosis, candida vaginitis, herpes simplex virus, chancroid, granuloma inguinale, lymphogranuloma venereum, scabies, human papillomavirus, vaginal trauma, vulvar trauma, adenosis, chlamydia vaginitis, gonorrhea, trichomonas vaginitis, condyloma acuminatum, syphilis, molluscum contagiosum, atrophic vaginitis, Paget's disease, lichen sclerosus, lichen planus, vulvodynia, toxic shock syndrome, vaginismus, vulvovaginitis, vulvar vestibulitis, and neoplastic disorders, such as squamous cell hyperplasia, clear cell carcinoma, basal cell carcinoma, melanomas, cancer of Bartholin's gland, and vulvar intraepitbelial neoplasia.

[0739] Disorders and/or diseases of the uterus that may be diagnosed, treated, and/or prevented with the compositions of the invention include, but are not limited to, dysmenorrhea, retroverted uterus, endometriosis, fibroids, adenomyosis, anovulatory bleeding, amenorrhea, Cushing's syndrome, hydatidiform moles, Asherman's syndrome, premature menopause, precocious puberty, uterine polyps, dysfunctional uterine bleeding (e.g., due to aberrant hormonal signals), and neoplastic disorders, such as adenocarcinomas, keiomyosarcomas, and sarcomas. Additionally, the polypeptides, polynucleotides, or agonists or antagonists of the invention may be useful as a marker or detector of, as well as in the diagnosis, treatment, and/or prevention of congenital uterine abnormalities, such as bicornuate uterus, septate uterus, simple unicomuate uterus, unicornuate uterus with a noncavitary rudimentary horn, unicornuate uterus with a non-communicating cavitary rudimentary horn, unicornuate uterus with a communicating cavitary horn, arcuate uterus, uterine didelfus, and T-shaped uterus.

[0740] Ovarian diseases and/or disorders that may be diagnosed, treated, and/or prevented with the compositions of the invention include, but are not limited to, anovulation, polycystic ovary syndrome (Stein-Leventhal syndrome), ovarian cysts, ovarian hypofunction, ovarian insensitivity to gonadotropins, ovarian overproduction of androgens, right ovarian vein syndrome, amenorrhea, hirutism, and ovarian cancer (including, but not limited to, primary and secondary cancerous growth, Sertoli-Leydig tumors, endometriod carcinoma of the ovary, ovarian papillary serous adenocarcinoma, ovarian mucinous adenocarcinoma, and Ovarian Krukenberg tumors).

[0741] Cervical diseases and/or disorders that may be diagnosed, treated, and/or prevented with the compositions of the invention include, but are not limited to, cervicitis, chronic cervicitis, mucopurulent cervicitis, cervical dysplasia, cervical polyps, Nabothian cysts, cervical erosion, cervical incompetence, and cervical neoplasms (including, for example, cervical carcinoma, squamous metaplasia, squamous cell carcinoma, adenosquamous cell neoplasia, and columnar cell neoplasia).

[0742] Additionally, diseases and/or disorders of the reproductive system that may be diagnosed, treated, and/or prevented with the compositions of the invention include, but are not limited to, disorders and/or diseases of pregnancy, including miscarriage and stillbirth, such as early abortion, late abortion, spontaneous abortion, induced abortion, therapeutic abortion, threatened abortion, missed abortion, incomplete abortion, complete abortion, habitual abortion, missed abortion, and septic abortion; ectopic pregnancy, anemia, Rh incompatibility, vaginal bleeding during pregnancy, gestational diabetes, intrauterine growth retardation, polyhydramnios, HELLP syndrome, abruptio placentae, placenta previa, hyperemesis, preeclampsia, eclampsia, herpes gestationis, and urticaria of pregnancy. Additionally, the polynucleotides, polypeptides, and agonists or antagonists of the present invention may be used in the diagnosis, treatment, and/or prevention of diseases that can complicate pregnancy, including heart disease, heart failure, rheumatic heart disease, congenital heart disease, mitral valve prolapse, high blood pressure, anemia, kidney disease, infectious disease (e.g., rubella, cytomegalovirus, toxoplasmosis, infectious hepatitis, chlamydia, HIV, AIDS, and genital herpes), diabetes mellitus, Graves' disease, thyroiditis, hypothyroidism, Hashimoto's thyroiditis, chronic active hepatitis, cirrhosis of the liver, primary biliary cirrhosis, asthma, systemic lupus eryematosis, rheumatoid arthritis, myasthenia gravis, idiopathic thrombocytopenic purpura, appendicitis, ovarian cysts, gallbladder disorders, and obstruction of the intestine.

[0743] Complications associated with labor and parturition that may be diagnosed, treated, and/or prevented with the compositions of the invention include, but are not limited to, premature rupture of the membranes, pre-term labor, post-term pregnancy, postmaturity, labor that progresses too slowly, fetal distress (e.g., abnormal heart rate (fetal or maternal), breathing problems, and abnormal fetal position), shoulder dystocia, prolapsed umbilical cord, amniotic fluid embolism, and aberrant uterine bleeding.

[0744] Further, diseases and/or disorders of the postdelivery period, that may be diagnosed, treated, and/or prevented with the compositions of the invention, include, but are not limited to, endometritis, myometritis, parametritis, peritonitis, pelvic thrombophlebitis, pulmonary embolism, endotoxemia, pyelonephritis, saphenous thrombophlebitis, mastitis, cystitis, postpartum hemorrhage, and inverted uterus.

[0745] Other disorders and/or diseases of the female reproductive system that may be diagnosed, treated, and/or prevented by the polynucleotides, polypeptides, and agonists or antagonists of the present invention include, but are not limited to, Turner's syndrome, pseudohermaphroditism, premenstrual syndrome, pelvic inflammatory disease, pelvic congestion (vascular engorgement), frigidity, anorgasmia, dyspareunia, ruptured fallopian tube, and Mittelschmerz.

[0746] Developmental and Inherited Disorders

[0747] Polynuceotides or polypeptides, or agonists or antagonists of the present invention may be used to treat, prevent, diagnose, and/or prognose diseases associated with mixed fetal tissues, including, but not limited to, developmental and inherited disorders or defects of the nervous system, musculoskelelal system, execretory system, cardiovascular system, hematopoietic system, gastrointestinal system, reproductive system, and respiratory system. Compositions of the present invention may also be used to treat, prevent, diagnose, and/or prognose developmental and inherited disorders or defects associated with, but not limited to, skin, hair, visual, and auditory tissues, metabolism. Additionally, the compositions of the invention may be useful in the diagnosis, treatment, and/or prevention of disorders or diseases associated with, but not limited to, chromosomal or genetic abnormalities and hyperproliferation or neoplasia.

[0748] Disorders or defects of the nervous system associated with developmental or inherited abnormalities that may be diagnosed, treated, and/or prevented with the compositions of the invention include, but are not limited to, adrenoleukodystrophy, agenesis of corpus callosum, Alexander disease, anencephaly, Angelman syndrome, Arnold-Chiari deformity, Batten disease, Canavan disease, cephalic disorders, Charcot-Marie-Tooth disease, encephalocele, Friedreich's ataxia, Gaucher's disease, Gorlin syndrome, Hallervorden-Spatz disease, hereditary spastic paraplegia, Huntington disease, hydranencephaly, hydrocephalus, Joubert syndrome, Lesch-Nyhan syndrome, leukodystrophy, Menkes disease, microcephaly, Niemann-Pick Type C1, neurofibromatosis, porencephaly, progeria, proteus syndrome, Refsum disease, spina bifida, Sturge-Weber syndrome, Tay-Sachs disease, tuberous sclerosis, and von Hippel-Lindau disease.

[0749] Developmental and inherited disorders resulting in disorders or defects of the musculoskeletal system that may be diagnosed, treated, and/or prevented with the compositions of the invention include, but are not limited to, achondroplasia, atlanto-occipital fusion, arthrogryposis mulitplex congenita, autosomal recessive muscular dystrophy, Becker's muscular dystrophy, cerebral palsy, choanal atresia, cleft lip, cleft palate, clubfoot, congenital amputation, congenital dislocation of the hip, congenital torticollis, congenital scoliosis, dopa-repsonsive dystonia, Duchenne muscular dystrophy, early-onset generalized dystonia, femoral torsion, Gorlin syndrome, hypophosphatasia, Klippel-Feil syndrome, knee dislocation, myoclonic dystonia, myotonic dystrophy, nail-patella syndrome, osteogenesis imperfecta, paroxysmal dystonia, progeria, prune-belly syndrome, rapid-onset dystonia parkinsonism, scolosis, syndactyly, Treacher Collins' syndrome, velocardiofacial syndrome, and X-linked dystonia-parkinsonism.

[0750] Developmental or hereditary disorders or defects of the excretory system that may be diagnosed, treated, and/or prevented with the compositions of the invention include, but are not limited to, Alport's syndrome, Bartter's syndrome, bladder diverticula, bladder exstrophy, cystinuria, epispadias, Fanconi's syndrome, Hartnup disease, horseshoe kidney, hypospadias, kidney agenesis, kidney ectopia, kidney malrotation, Liddle's syndrome, medullary cystic disease, medullary sponge, multicystic kidney, kidney polycystic kidney disease, nail-patella syndrome, Potter's syndrome, urinary tract flow obstruction, vitamin D-resistant rickets, and Wilm's tumor.

[0751] Cardiovascular disorders or defects of developmental or hereditary origin that may be diagnosed, treated, and/or prevented with the compositions of the invention include, but are not limited to, aortic valve stenosis, atrial septal defects, artioventricular (A-V) canal defect, bicuspid aortic valve, coarctation or the aorta, dextrocardia, Ebstein's anomaly, Eisenmenger's complex, hypoplastic left heart syndrome, Marfan syndrome, patent ductus arteriosus, progeria, pulmonary atresia, pulmonary valve stenosis, subaortic stenosis, tetralogy of fallot, total anomalous pulmonary venous (P-V) connection, transposition of the great arteries, tricuspid atresia, truncus arteriosus, ventricular septal defects. Developmental or inherited disorders resulting in disorders involving the hematopoietic system that may be diagnosed, treated, and/or prevented with the compositions of the invention include, but not limited to, Bernard-Soulier syndrome, Chediak-Higashi syndrome, hemophilia, Hermansky-Pudlak syndrome, sickle cell anemia, storage pool disease, thromboxane A2 dysfunction, thrombasthenia, and von Willebrand's disease.

[0752] The compositions of the invention may also be used to diagnose, treat, and/or prevent developmental and inherited disorders resulting in disorders or defects of the gastrointestinal system, including, but not limited to, anal atresia, biliary atresia, esophageal atresia, diaphragmatic hernia, Hirschsprung's disease, Meckel's diverticulum, oligohydramnios, omphalocele, polyhydramnios, porphyria, situs inversus viscera. Developmental or inherited disorders resulting in metabolic disorders that may be diagnosed, treated, and/or prevented with the compositions of the invention include, but are not limited to, alpha-1 antitrypsin deficiency, cystic fibrosis, hemochromatosis, lysosomal storage disease, phenylketonuria, Wilson's disease, and Zellweger syndrome.

[0753] Disorders of the reproductive system that are developmentally or hereditary related that may also be diagnosed, treated, and/or prevented with the compositions of the invention include, but are not limited to, androgen insensitivity syndrome, ambiguous genitalia, autosomal sex reversal, congenital adreneal hyperplasia, gonadoblastoma, ovarian germ cell cancer, pseudohermaphroditism, true hermaphroditism, undescended testis, XX male syndrome, and XY female type gonadal dysgenesis. The compositions of the invention may also be used to diagnose, treat, and/or prevent developmental or inherited respiratory defects including, but not limited to, askin tumor, azygos lobe, congenital diaphragmatic hernia, congenital lobar emphysema, cystic adenomatoid malformation, lobar emphysema, hyaline membrane disease, and pectus excavatum.

[0754] Developmental or inherited disorders may also result from chromosomal or genetic aberration that may be diagnosed, treated, and/or prevented with the compositions of the invention including, but not limited to, 4p-syndrome, cri du chat syndrome, Digeorge syndrome, Down's syndrome, Edward's syndrome, fragile X syndrome, Klinefelter's syndrome, Patau's syndrome, Prader-Willi syndrome, progeria, Turner's syndrome, triple X syndrome, and XYY syndrome. Other developmental disorders that can be diagnosed, treated, and/or prevented with the compositions of the invention, include, but are not limited to, fetal alcohol syndrome, and can be caused by environmental factors surrounding the developing fetus.

[0755] The compositions of the invention may further be able to be used to diagnose, treat, and/or prevent errors in development or a genetic disposition that may result in hyperproliferative disorders or neoplasms, including, but not limited to, acute childhood lymphoblastic leukemia, askin tumor, Beckwith-Wiedemann syndrome, childhood acute myeloid leukemia, childhood brain stem glioma, childhood cerebellar astrocytoma, childhood extracranial germ cell tumors childhood (primary), gonadoblastoma, hepatocellular cancer, childhood Hodgkin's disease, childhood Hodgkin's lymphoma, childhood hypothalamic and visual pathway glioma, childhood (primary) liver cancer, childhood lymphoblastic leukemia, childhood medulloblastoma, childhood non-Hodgkin's lymphoma, childhood pineal and supratentorial primitive neuroectodermal tumors, childhood primary liver cancer, childhood rhabdomyosarcoma, childhood soft tissue sarcoma, Gorlin syndrome, familial multiple endrocrine neoplasia type I, neuroblastoma, ovarian germ cell cancer, pheochromocytoma, retinoblastoma, and Wilm's tumor.

[0756] Polypeptides may be administered using any method known in the art, including, but not limited to, direct needle injection at the delivery site, intravenous injection, topical administration, catheter infusion, biolistic injectors, particle accelerators, gelfoam sponge depots, other commercially available depot materials, osmotic pumps, oral or suppositorial solid pharmaceutical formulations, decanting or topical applications during surgery, aerosol delivery. Such methods are known in the art. Polypeptides may be administered as part of a Therapeutic, described in more detail below. Methods of delivering polynucleotides are described in more detail herein.

[0757] Diseases at the Cellular Level

[0758] Diseases associated with increased cell survival or the inhibition of apoptosis that could be treated, prevented, diagnosed and/or prognosed using polynucleotides or polypeptides, as well as antagonists or agonists of the present invention, include cancers (such as follicular lymphomas, carcinomas with p53 mutations, and hormone-dependent tumors, including, but not limited to colon cancer, cardiac tumors, pancreatic cancer, melanoma, retinoblastoma, glioblastoma, lung cancer, intestinal cancer, testicular cancer, stomach cancer, neuroblastoma, myxoma, myoma, lymphoma, endothelioma, osteoblastoma, osteoclastoma, osteosarcoma, chondrosarcoma, adenoma, breast cancer, prostate cancer, Kaposi's sarcoma and ovarian cancer); autoimmune disorders (such as, multiple sclerosis, Sjogren's syndrome, Hashimoto's thyroiditis, biliary cirrhosis, Behcet's disease, Crohn's disease, polymyositis, systemic lupus erythematosus and immune-related glomerulonephritis and rheumatoid arthritis) and viral infections (such as herpes viruses, pox viruses and adenoviruses), inflammation, graft v. host disease, acute graft rejection, and chronic graft rejection.

[0759] In preferred embodiments, polynucleotides, polypeptides, and/or antagonists of the invention are used to inhibit growth, progression, and/or metastasis of cancers, in particular those [listed above] involving lung tissues.

[0760] Additional diseases or conditions associated with increased cell survival that could be treated or detected by polynucleotides or polypeptides, or agonists or antagonists of the present invention include, but are not limited to, progression, and/or metastases of malignancies and related disorders such as leukemia (including acute leukemias (e.g., acute lymphocytic leukemia, acute myelocytic leukemia (including myeloblastic, promyelocytic, myelomonocytic, monocytic, and erythroleukemia)) and chronic leukemias (e.g., chronic myelocytic (granulocytic) leukemia and chronic lymphocytic leukemia)), polycythemia vera, lymphomas (e.g., Hodgkin's disease and non-Hodgkin's disease), multiple myeloma, Waldenstrom's macroglobulinemia, heavy chain disease, and solid tumors including, but not limited to, sarcomas and carcinomas such as fibrosarcoma, myxosarcoma, liposarcoma, chondrosarcoma, osteogenic sarcoma, chordoma, angiosarcoma, endotheliosarcoma, lymphangiosarcoma, lymphangioendotheliosarcoma, synovioma, mesothelioma, Ewing's tumor, leiomyosarcoma, rhabdomyosarcoma, colon carcinoma, pancreatic cancer, breast cancer, ovarian cancer, prostate cancer, squamous cell carcinoma, basal cell carcinoma, adenocarcinoma, sweat gland carcinoma, sebaceous gland carcinoma, papillary carcinoma, papillary adenocarcinomas, cystadenocarcinoma, medullary carcinoma, bronchogenic carcinoma, renal cell carcinoma, hepatoma, bile duct carcinoma, choriocarcinoma, seminoma, embryonal carcinoma, Wilm's tumor, cervical cancer, testicular tumor, lung carcinoma, small cell lung carcinoma, bladder carcinoma, epithelial carcinoma, glioma, astrocytoma, medulloblastoma, craniopharyngioma, ependymoma, pinealoma, hemangioblastoma, acoustic neuroma, oligodendroglioma, menangioma, melanoma, neuroblastoma, and retinoblastoma.

[0761] Diseases associated with increased apoptosis that could be treated, prevented, diagnosted, and/or prognosed using polynucleotides or polypeptides, as well as agonists or antagonists of the present invention, include, but are not limited to, AIDS; neurodegenerative disorders (such as Alzheimer's disease, Parkinson's disease, Amyotrophic lateral sclerosis, Retinitis pigmentosa, Cerebellar degeneration and brain tumor or prior associated disease); autoimmune disorders (such as, multiple sclerosis, Sjogren's syndrome, Hashimoto's thyroiditis, biliary cirrhosis, Behcet's disease, Crohn's disease, polymyositis, systemic lupus erythematosus and immune-related glomerulonephritis and rheumatoid arthritis) myelodysplastic syndromes (such as aplastic anemia), graft v. host disease, ischemic injury (such as that caused by myocardial infarction, stroke and reperfusion injury), liver injury (e.g., hepatitis related liver injury, ischemia/reperfusion injury, cholestosis (bile duct injury) and liver cancer); toxin-induced liver disease (such as that caused by alcohol), septic shock, cachexia and anorexia.

[0762] Wound Healing and Epithelial Cell Proliferation

[0763] In accordance with yet a further aspect of the present invention, there is provided a process for utilizing polynucleotides or polypeptides, as well as agonists or antagonists of the present invention, for therapeutic purposes, for example, to stimulate epithelial cell proliferation and basal keratinocytes for the purpose of wound healing, and to stimulate hair follicle production and healing of dermal wounds. Polynucleotides or polypeptides, as well as agonists or antagonists of the present invention, may be clinically useful in stimulating wound healing including surgical wounds, excisional wounds, deep wounds involving damage of the dermis and epidermis, eye tissue wounds, dental tissue wounds, oral cavity wounds, diabetic ulcers, dermal ulcers, cubitus ulcers, arterial ulcers, venous stasis ulcers, burns resulting from heat exposure or chemicals, and other abnormal wound healing conditions such as uremia, malnutrition, vitamin deficiencies and complications associated with systemic treatment with steroids, radiation therapy and antineoplastic drugs and antimetabolites. Polynucleotides or polypeptides, as well as agonists or antagonists of the present invention, could be used to promote dermal reestablishment subsequent to dermal loss.

[0764] Polynucleotides or polypeptides, as well as agonists or antagonists of the present invention, could be used to increase the adherence of skin grafts to a wound bed and to stimulate re-epithelialization from the wound bed. The following are types of grafts that polynucleotides or polypeptides, agonists or antagonists of the present invention, could be used to increase adherence to a wound bed: autografts, artificial skin, allografts, autodermic graft, autoepdermic grafts, avacular grafts, Blair-Brown grafts, bone graft, brephoplastic grafts, cutis graft, delayed graft, dermic graft, epidermic graft, fascia graft, full thickness graft, heterologous graft, xenograft, homologous graft, hyperplastic graft, lamellar graft, mesh graft, mucosal graft, Ollier-Thiersch graft, omenpal graft, patch graft, pedicle graft, penetrating graft, split skin graft, thick split graft. Polynucleotides or polypeptides, as well as agonists or antagonists of the present invention, can be used to promote skin strength and to improve the appearance of aged skin.

[0765] It is believed that polynucleotides or polypeptides, as well as agonists or antagonists of the present invention, will also produce changes in hepatocyte proliferation, and epithelial cell proliferation in the lung, breast, pancreas, stomach, small intestine, and large intestine. Polynucleotides or polypeptides, as well as agonists or antagonists of the present invention, could promote proliferation of epithelial cells such as sebocytes, hair follicles, hepatocytes, type II pneumocytes, mucin-producing goblet cells, and other epithelial cells and their progenitors contained within the skin, lung, liver, and gastrointestinal tract. Polynucleotides or polypeptides, agonists or antagonists of the present invention, may promote proliferation of endothelial cells, keratinocytes, and basal keratinocytes.

[0766] Polynucleotides or polypeptides, as well as agonists or antagonists of the present invention, could also be used to reduce the side effects of gut toxicity that result from radiation, chemotherapy treatments or viral infections. Polynucleotides or polypeptides, as well as agonists or antagonists of the present invention, may have a cytoprotective effect on the small intestine mucosa. Polynucleotides or polypeptides, as well as agonists or antagonists of the present invention, may also stimulate healing of mucositis (mouth ulcers) that result from chemotherapy and viral infections.

[0767] Polynucleotides or polypeptides, as well as agonists or antagonists of the present invention, could further be used in full regeneration of skin in full and partial thickness skin defects, including burns, (i.e., repopulation of hair follicles, sweat glands, and sebaceous glands), treatment of other skin defects such as psoriasis. Polynucleotides or polypeptides, as well as agonists or antagonists of the present invention, could be used to treat epidermolysis bullosa, a defect in adherence of the epidermis to the underlying dermis which results in frequent, open and painful blisters by accelerating reepithelialization of these lesions. Polynucleotides or polypeptides, as well as agonists or antagonists of the present invention, could also be used to treat gastric and doudenal ulcers and help heal by scar formation of the mucosal lining and regeneration of glandular mucosa and duodenal mucosal lining more rapidly. Inflammatory bowel diseases, such as Crohn's disease and ulcerative colitis, are diseases, which result in destruction of the mucosal surface of the small or large intestine, respectively. Thus, polynucleotides or polypeptides, as well as agonists or antagonists of the present invention, could be used to promote the resurfacing of the mucosal surface to aid more rapid healing and to prevent progression of inflammatory bowel disease. Treatment with polynucleotides or polypeptides, agonists or antagonists of the present invention, is expected to have a significant effect on the production of mucus throughout the gastrointestinal tract and could be used to protect the intestinal mucosa from injurious substances that are ingested or following surgery. Polynucleotides or polypeptides, as well as agonists or antagonists of the present invention, could be used to treat diseases associate with the under expression.

[0768] Moreover, polynucleotides or polypeptides, as well as agonists or antagonists of the present invention, could be used to prevent and heal damage to the lungs due to various pathological states. Polynucleotides or polypeptides, as well as agonists or antagonists of the present invention, could stimulate proliferation and differentiation and promote the repair of alveoli and brochiolar epithelium to prevent or treat acute or chronic lung damage. For example, emphysema, which results in the progressive loss of aveoli, and inhalation injuries, i.e., resulting from smoke inhalation and burns, that cause necrosis of the bronchiolar epithelium and alveoli could be effectively treated using polynucleotides or polypeptides, agonists or antagonists of the present invention. Also, polynucleotides or polypeptides, as well as agonists or antagonists of the present invention, could be used to stimulate the proliferation of and differentiation of type II pneumocytes, which may help treat or prevent disease such as hyaline membrane diseases, such as infant respiratory distress syndrome and bronchopulmonary displasia, in premature infants.

[0769] Polynucleotides or polypeptides, as well as agonists or antagonists of the present invention, could stimulate the proliferation and differentiation of hepatocytes and, thus, could be used to alleviate or treat liver diseases and pathologies such as fulminant liver failure caused by cirrhosis, liver damage caused by viral hepatitis and toxic substances (i.e., acetaminophen, carbon tetraholoride and other hepatotoxins known in the art).

[0770] In addition, polynucleotides or polypeptides, as well as agonists or antagonists of the present invention, could be used treat or prevent the onset of diabetes mellitus. In patients with newly diagnosed Types I and II diabetes, where some islet cell function remains, polynucleotides or polypeptides, as well as agonists or antagonists of the present invention, could be used to maintain the islet function so as to alleviate, delay or prevent permanent manifestation of the disease. Also, polynucleotides or polypeptides, as well as agonists or antagonists of the present invention, could be used as an auxiliary in islet cell transplantation to improve or promote islet cell function.

[0771] Infectious Disease

[0772] Polynucleotides or polypeptides, as well as agonists or antagonists of the present invention can be used to treat or detect infectious agents. For example, by increasing the immune response, particularly increasing the proliferation and differentiation of B and/or T cells, infectious diseases may be treated. The immune response may be increased by either enhancing an existing immune response, or by initiating a new immune response. Alternatively, polynucleotides or polypeptides, as well as agonists or antagonists of the present invention may also directly inhibit the infectious agent, without necessarily eliciting an immune response.

[0773] Viruses are one example of an infectious agent that can cause disease or symptoms that can be treated or detected by a polynucleotide or polypeptide and/or agonist or antagonist of the present invention. Examples of viruses, include, but are not limited to Examples of viruses, include, but are not limited to the following DNA and RNA viruses and viral families: Arbovirus, Adenoviridae, Arenaviridae, Arterivirus, Birnaviridae, Bunyaviridae, Caliciviridae, Circoviridae, Coronaviridae, Dengue, EBV, HIV, Flaviviridae, Hepadnaviridae (Hepatitis), Herpesviridae (such as, Cytomegalovirus, Herpes Simplex, Herpes Zoster), Mononegavirus (e.g., Paramyxoviridae, Morbillivirus, Rhabdoviridae), Orthomyxoviridae (e.g., Influenza A, Influenza B, and parainfluenza), Papiloma virus, Papovaviridae, Parvoviridae, Picornaviridae, Poxviridae (such as Smallpox or Vaccinia), Reoviridae (e.g., Rotavirus), Retroviridae (HTLV-I, HTLV-II, Lentivirus), and Togaviridae (e.g., Rubivirus). Viruses falling within these families can cause a variety of diseases or symptoms, including, but not limited to: arthritis, bronchiollitis, respiratory syncytial virus, encephalitis, eye infections (e.g., conjunctivitis, keratitis), chronic fatigue syndrome, hepatitis (A, B, C, E, Chronic Active, Delta), Japanese B encephalitis, Junin, Chikungunya, Rift Valley fever, yellow fever, meningitis, opportunistic infections (e.g., AIDS), pneumonia, Burkitt's Lymphoma, chickenpox, hemorrhagic fever, Measles, Mumps, Parainfluenza, Rabies, the common cold, Polio, leukemia, Rubella, sexually transmitted diseases, skin diseases (e.g., Kaposi's, warts), and viremia. polynucleotides or polypeptides, or agonists or antagonists of the invention, can be used to treat or detect any of these symptoms or diseases. In specific embodiments, polynucleotides, polypeptides, or agonists or antagonists of the invention are used to treat: meningitis, Dengue, EBV, and/or hepatitis (e.g., hepatitis B). In an additional specific embodiment polynucleotides, polypeptides, or agonists or antagonists of the invention are used to treat patients nonresponsive to one or more other commercially available hepatitis vaccines. In a further specific embodiment polynucleotides, polypeptides, or agonists or antagonists of the invention are used to treat AIDS.

[0774] Similarly, bacterial or fungal agents that can cause disease or symptoms and that can be treated or detected by a polynucleotide or polypeptide and/or agonist or antagonist of the present invention include, but not limited to, include, but not limited to, the following Gram-Negative and Gram-positive bacteria and bacterial families and fungi: Actinomycetales (e.g., Corynebacterium, Mycobacterium, Norcardia), Cryptococcus neoformans, Aspergillosis, Bacillaceae (e.g., Anthrax, Clostridium), Bacteroidaceae, Blastomycosis, Bordetella, Borrelia (e.g., Borrelia burgdorferi, Brucellosis, Candidiasis, Campylobacter, Coccidioidomycosis, Cryptococcosis, Dermatocycoses, E. coli (e.g., Enterotoxigenic E. coli and Enterohemorrhagic E. coli), Enterobacteriaceae (Klebsiella, Salmonella (e.g., Salmonella typhi, and Salmonella paratyphi), Serratia, Yersinia), Erysipelothrix, Helicobacter, Legionellosis, Leptospirosis, Listeria, Mycoplasmatales, Mycobacterium leprae, Vibrio cholerae, Neisseriaceae (e.g., Acinetobacter, Gonorrhea, Menigococcal), Meisseria meningitidis, Pasteurellacea Infections (e.g., Actinobacillus, Heamophilus (e.g., Heamophilus influenza type B), Pasteurella), Pseudomonas, Rickettsiaceae, Chlamydiaceae, Treponema spp., Leptospira spp., Shigella spp., Staphylococcal, Meningiococcal, Pneumococcal and Streptococcal (e.g., Streptococcus pneumoniae and Group B Streptococcus). These bacterial or fungal families can cause the following diseases or symptoms, including, but not limited to: bacteremia, endocarditis, eye infections (conjunctivitis, tuberculosis, uveitis), gingivitis, opportunistic infections (e.g., AIDS related infections), paronychia, prosthesis-related infections, Reiter's Disease, respiratory tract infections, such as Whooping Cough or Empyema, sepsis, Lyme Disease, Cat-Scratch Disease, Dysentery, Paratyphoid Fever, food poisoning, Typhoid, pneumonia, Gonorrhea, meningitis (e.g., mengitis types A and B), Chlamydia, Syphilis, Diphtheria, Leprosy, Paratuberculosis, Tuberculosis, Lupus, Botulism, gangrene, tetanus, impetigo, Rheumatic Fever, Scarlet Fever, sexually transmitted diseases, skin diseases (e.g., cellulitis, dermatocycoses), toxemia, urinary tract infections, wound infections. Polynucleotides or polypeptides, agonists or antagonists of the invention, can be used to treat or detect any of these symptoms or diseases. In specific embodiments, Ppolynucleotides, polypeptides, agonists or antagonists of the invention are used to treat: tetanus, Diptheria, botulism, and/or meningitis type B.

[0775] Moreover, parasitic agents causing disease or symptoms that can be treated or detected by a polynucleotide or polypeptide and/or agonist or antagonist of the present invention include, but not limited to, the following families or class: Amebiasis, Babesiosis, Coccidiosis, Cryptosporidiosis, Dientamoebiasis, Dourine, Ectoparasitic, Giardiasis, Helminthiasis, Leishmaniasis, Theileriasis, Toxoplasmosis, Trypanosomiasis, and Trichomonas and Sporozoans (e.g., Plasmodium virax, Plasmodium falciparium, Plasmodium malariae and Plasmodium ovale). These parasites can cause a variety of diseases or symptoms, including, but not limited to: Scabies, Trombiculiasis, eye infections, intestinal disease (e.g., dysentery, giardiasis), liver disease, lung disease, opportunistic infections (e.g., AIDS related), malaria, pregnancy complications, and toxoplasmosis. Polynucleotides or polypeptides, or agonists or antagonists of the invention, can be used to treat or detect any of these symptoms or diseases.

[0776] Polynucleotides or polypeptides, as well as agonists or antagonists of the present invention of the present invention could either be by administering an effective amount of a polypeptide to the patient, or by removing cells from the patient, supplying the cells with a polynucleotide of the present invention, and returning the engineered cells to the patient (ex vivo therapy). Moreover, the polypeptide or polynucleotide of the present invention can be used as an antigen in a vaccine to raise an immune response against infectious disease.

[0777] Regeneration

[0778] Polynucleotides or polypeptides, as well as agonists or antagonists of the present invention can be used to differentiate, proliferate, and attract cells, leading to the regeneration of tissues. (See, Science 276:59-87 (1997).) The regeneration of tissues could be used to repair, replace, or protect tissue damaged by congenital defects, trauma (wounds, burns, incisions, or ulcers), age, disease (e.g. osteoporosis, osteocarthritis, periodontal disease, liver failure), surgery, including cosmetic plastic surgery, fibrosis, reperfusion injury, or systemic cytokine damage.

[0779] Tissues that could be regenerated using the present invention include organs (e.g., pancreas, liver, intestine, kidney, skin, endothelium), muscle (smooth, skeletal or cardiac), vasculature (including vascular and lymphatics), nervous, hematopoietic, and skeletal (bone, cartilage, tendon, and ligament) tissue. Preferably, regeneration occurs without or decreased scarring. Regeneration also may include angiogenesis.

[0780] Moreover, polynucleotides or polypeptides, as well as agonists or antagonists of the present invention, may increase regeneration of tissues difficult to heal. For example, increased tendon/ligament regeneration would quicken recovery time after damage. Polynucleotides or polypeptides, as well as agonists or antagonists of the present invention could also be used prophylactically in an effort to avoid damage. Specific diseases that could be treated include of tendinitis, carpal tunnel syndrome, and other tendon or ligament defects. A further example of tissue regeneration of non-healing wounds includes pressure ulcers, ulcers associated with vascular insufficiency, surgical, and traumatic wounds.

[0781] Similarly, nerve and brain tissue could also be regenerated by using polynucleotides or polypeptides, as well as agonists or antagonists of the present invention, to proliferate and differentiate nerve cells. Diseases that could be treated using this method include central and peripheral nervous system diseases, neuropathies, or mechanical and traumatic disorders (e.g., spinal cord disorders, head trauma, cerebrovascular disease, and stoke). Specifically, diseases associated with peripheral nerve injuries, peripheral neuropathy (e.g., resulting from chemotherapy or other medical therapies), localized neuropathies, and central nervous system diseases (e.g., Alzheimer's disease, Parkinson's disease, Huntington's disease, amyotrophic lateral sclerosis, and Shy-Drager syndrome), could all be treated using the polynucleotides or polypeptides, as well as agonists or antagonists of the present invention.

[0782] Chemotaxis

[0783] Polynucleotides or polypeptides, as well as agonists or antagonists of the present invention may have chemotaxis activity. A chemotaxic molecule attracts or mobilizes cells (e.g., monocytes, fibroblasts, neutrophils, T-cells, mast cells, eosinophils, epithelial and/or endothelial cells) to a particular site in the body, such as inflammation, infection, or site of hyperproliferation. The mobilized cells can then fight off and/or heal the particular trauma or abnormality.

[0784] Polynucleotides or polypeptides, as well as agonists or antagonists of the present invention may increase chemotaxic activity of particular cells. These chemotactic molecules can then be used to treat inflammation, infection, hyperproliferative disorders, or any immune system disorder by increasing the number of cells targeted to a particular location in the body. For example, chemotaxic molecules can be used to treat wounds and other trauma to tissues by attracting immune cells to the injured location. Chemotactic molecules of the present invention can also attract fibroblasts, which can be used to treat wounds.

[0785] It is also contemplated that polynucleotides or polypeptides, as well as agonists or antagonists of the present invention may inhibit chemotactic activity. These molecules could also be used to treat disorders. Thus, polynucleotides or polypeptides, as well as agonists or antagonists of the present invention could be used as an inhibitor of chemotaxis.

[0786] Binding Activity

[0787] A polypeptide of the present invention may be used to screen for molecules that bind to the polypeptide or for molecules to which the polypeptide binds. The binding of the polypeptide and the molecule may activate (agonist), increase, inhibit (antagonist), or decrease activity of the polypeptide or the molecule bound. Examples of such molecules include antibodies, oligonucleotides, proteins (e.g., receptors),or small molecules.

[0788] Preferably, the molecule is closely related to the natural ligand of the polypeptide, e.g., a fragment of the ligand, or a natural substrate, a ligand, a structural or functional mimetic. (See, Coligan et al., Current Protocols in Immunology 1(2):Chapter 5 (1991).) Similarly, the molecule can be closely related to the natural receptor to which the polypeptide binds, or at least, a fragment of the receptor capable of being bound by the polypeptide (e.g., active site). In either case, the molecule can be rationally designed using known techniques.

[0789] Preferably, the screening for these molecules involves producing appropriate cells, which express the polypeptide. Preferred cells include cells from mammals, yeast, Drosophila, or E. coli. Cells expressing the polypeptide (or cell membrane containing the expressed polypeptide) are then preferably contacted with a test compound potentially containing the molecule to observe binding, stimulation, or inhibition of activity of either the polypeptide or the molecule.

[0790] The assay may simply test binding of a candidate compound to the polypeptide, wherein binding is detected by a label, or in an assay involving competition with a labeled competitor. Further, the assay may test whether the candidate compound results in a signal generated by binding to the polypeptide.

[0791] Alternatively, the assay can be carried out using cell-free preparations, polypeptide/molecule affixed to a solid support, chemical libraries, or natural product mixtures. The assay may also simply comprise the steps of mixing a candidate compound with a solution containing a polypeptide, measuring polypeptide/molecule activity or binding, and comparing the polypeptide/molecule activity or binding to a standard.

[0792] Preferably, an ELISA assay can measure polypeptide level or activity in a sample (e.g., biological sample) using a monoclonal or polyclonal antibody. The antibody can measure polypeptide level or activity by either binding, directly or indirectly, to the polypeptide or by competing with the polypeptide for a substrate.

[0793] Additionally, the receptor to which the polypeptide of the present invention binds can be identified by numerous methods known to those of skill in the art, for example, ligand panning and FACS sorting (Coligan, et al., Current Protocols in Immun., 1(2), Chapter 5, (1991)). For example, expression cloning is employed wherein polyadenylated RNA is prepared from a cell responsive to the polypeptides, for example, NIH3T3 cells which are known to contain multiple receptors for the FGF family proteins, and SC-3 cells, and a cDNA library created from this RNA is divided into pools and used to transfect COS cells or other cells that are not responsive to the polypeptides. Transfected cells which are grown on glass slides are exposed to the polypeptide of the present invention, after they have been labeled. The polypeptides can be labeled by a variety of means including iodination or inclusion of a recognition site for a site-specific protein kinase.

[0794] Following fixation and incubation, the slides are subjected to auto-radiographic analysis. Positive pools are identified and sub-pools are prepared and re-transfected using an iterative sub-pooling and re-screening process, eventually yielding a single clones that encodes the putative receptor.

[0795] As an alternative approach for receptor identification, the labeled polypeptides can be photoaffinity linked with cell membrane or extract preparations that express the receptor molecule. Cross-linked material is resolved by PAGE analysis and exposed to X-ray film. The labeled complex containing the receptors of the polypeptides can be excised, resolved into peptide fragments, and subjected to protein microsequencing. The amino acid sequence obtained from microsequencing would be used to design a set of degenerate oligonucleotide probes to screen a cDNA library to identify the genes encoding the putative receptors.

[0796] Moreover, the techniques of gene-shuffling, motif-shuffling, exon-shuffling, and/or codon-shuffling (collectively referred to as “DNA shuffling”) may be employed to modulate the activities of the polypeptide of the present invention thereby effectively generating agonists and antagonists of the polypeptide of the present invention. See generally, U.S. Pat. Nos. 5,605,793, 5,811,238, 5,830,721, 5,834,252, and 5,837,458, and Patten, P. A., et al., Curr. Opinion Biotechnol. 8:724-33 (1997); Harayama, S. Trends Biotechnol. 16(2):76-82 (1998); Hansson L. O., et al., J. Mol. Biol. 287:265-76 (1999); and Lorenzo, M. M. and Blasco, R. Biotechniques 24(2):308-13 (1998); each of these patents and publications are hereby incorporated by reference). In one embodiment, alteration of polynucleotides and corresponding polypeptides may be achieved by DNA shuffling. DNA shuffling involves the assembly of two or more DNA segments into a desired molecule by homologous, or site-specific, recombination. In another embodiment, polynucleotides and corresponding polypeptides may be altered by being subjected to random mutagenesis by error-prone PCR, random nucleotide insertion or other methods prior to recombination. In another embodiment, one or more components, motifs, sections, parts, domains, fragments, etc., of the polypeptide of the present invention may be recombined with one or more components, motifs, sections, parts, domains, fragments, etc. of one or more heterologous molecules. In preferred embodiments, the heterologous molecules are family members. In further preferred embodiments, the heterologous molecule is a growth factor such as, for example, platelet-derived growth factor (PDGF), insulin-like growth factor (IGF-I), transforming growth factor (TGF)-alpha, epidermal growth factor (EGF), fibroblast growth factor (FGF), TGF-beta, bone morphogenetic protein (BMP)-2, BMP-4, BMP-5, BMP-6, BMP-7, activins A and B, decapentaplegic(dpp), 60A, OP-2, dorsalin, growth differentiation factors (GDFs), nodal, MIS, inhibin-alpha, TGF-beta1, TGF-beta2, TGF-beta3, TGF-beta5, and glial-derived neurotrophic factor (GDNF).

[0797] Other preferred fragments are biologically active fragments of the polypeptide of the present invention. Biologically active fragments are those exhibiting activity similar, but not necessarily identical, to an activity of the polypeptide of the present invention. The biological activity of the fragments may include an improved desired activity, or a decreased undesirable activity.

[0798] Additionally, this invention provides a method of screening compounds to identify those, which modulate the action of the polypeptide of the present invention. An example of such an assay comprises combining a mammalian fibroblast cell, the polypeptide of the present invention, the compound to be screened and ³[H] thymidine under cell culture conditions where the fibroblast cell would normally proliferate. A control assay may be performed in the absence of the compound to be screened and compared to the amount of fibroblast proliferation in the presence of the compound to determine if the compound stimulates proliferation by determining the uptake of 3[H] thymidine in each case. The amount of fibroblast cell proliferation is measured by liquid scintillation chromatography, which measures the incorporation of ³[H] thymidine. Both agonist and antagonist compounds may be identified by this procedure.

[0799] In another method, a mammalian cell or membrane preparation expressing a receptor for a polypeptide of the present invention is incubated with a labeled polypeptide of the present invention in the presence of the compound. The ability of the compound to enhance or block this interaction could then be measured. Alternatively, the response of a known second messenger system following interaction of a compound to be screened and the receptor is measured and the ability of the compound to bind to the receptor and elicit a second messenger response is measured to determine if the compound is a potential agonist or antagonist. Such second messenger systems include but are not limited to, cAMP guanylate cyclase, ion channels or phosphoinositide hydrolysis.

[0800] All of these above assays can be used as diagnostic or prognostic markers. The molecules discovered using these assays can be used to treat disease or to bring about a particular result in a patient (e.g., blood vessel growth) by activating or inhibiting the polypeptide/molecule. Moreover, the assays can discover agents which may inhibit or enhance the production of the polypeptides of the invention from suitably manipulated cells or tissues.

[0801] Therefore, the invention includes a method of identifying compounds which bind to a polypeptide of the invention comprising the steps of: (a) incubating a candidate binding compound with a polypeptide of the present invention; and (b) determining if binding has occurred. Moreover, the invention includes a method of identifying agonists/antagonists comprising the steps of: (a) incubating a candidate compound with a polypeptide of the present invention, (b) assaying a biological activity, and (b) determining if a biological activity of the polypeptide has been altered.

[0802] Targeted Delivery

[0803] In another embodiment, the invention provides a method of delivering compositions to targeted cells expressing a receptor for a polypeptide of the invention, or cells expressing a cell bound form of a polypeptide of the invention.

[0804] As discussed herein, polypeptides or antibodies of the invention may be associated with heterologous polypeptides, heterologous nucleic acids, toxins, or prodrugs via hydrophobic, hydrophilic, ionic and/or covalent interactions. In one embodiment, the invention provides a method for the specific delivery of compositions of the invention to cells by administering polypeptides of the invention (including antibodies) that are associated with heterologous polypeptides or nucleic acids. In one example, the invention provides a method for delivering a therapeutic protein into the targeted cell. In another example, the invention provides a method for delivering a single stranded nucleic acid (e.g., antisense or ribozymes) or double stranded nucleic acid (e.g., DNA that can integrate into the cell's genome or replicate episomally and that can be transcribed) into the targeted cell.

[0805] In another embodiment, the invention provides a method for the specific destruction of cells (e.g., the destruction of tumor cells) by administering polypeptides of the invention (e.g., polypeptides of the invention or antibodies of the invention) in association with toxins or cytotoxic prodrugs.

[0806] By “toxin” is meant compounds that bind and activate endogenous cytotoxic effector systems, radioisotopes, holotoxins, modified toxins, catalytic subunits of toxins, or any molecules or enzymes not normally present in or on the surface of a cell that under defined conditions cause the cell's death. Toxins that may be used according to the methods of the invention include, but are not limited to, radioisotopes known in the art, compounds such as, for example, antibodies (or complement fixing containing portions thereof) that bind an inherent or induced endogenous cytotoxic effector system, thymidine kinase, endonuclease, RNAse, alpha toxin, ricin, abrin, Pseudomonas exotoxin A, diphtheria toxin, saporin, momordin, gelonin, pokeweed antiviral protein, alpha-sarcin and cholera toxin. By “cytotoxic prodrug” is meant a non-toxic compound that is converted by an enzyme, normally present in the cell, into a cytotoxic compound. Cytotoxic prodrugs that may be used according to the methods of the invention include, but are not limited to, glutamyl derivatives of benzoic acid mustard alkylating agent, phosphate derivatives of etoposide or mitomycin C, cytosine arabinoside, daunorubisin, and phenoxyacetamide derivatives of doxorubicin.

[0807] Drug Screening

[0808] Further contemplated is the use of the polypeptides of the present invention, or the polynucleotides encoding these polypeptides, to screen for molecules, which modify the activities of the polypeptides of the present invention. Such a method would include contacting the polypeptide of the present invention with a selected compound(s) suspected of having antagonist or agonist activity, and assaying activity of these polypeptides following binding.

[0809] This invention is particularly useful for screening therapeutic compounds by using the polypeptides of the present invention, or binding fragments thereof, in any of a variety of drug screening techniques. The polypeptide or fragment employed in such a test may be affixed to a solid support, expressed on a cell surface, free in solution, or located intracellularly. One method of drug screening utilizes eukaryotic or prokaryotic host cells which are stably transformed with recombinant nucleic acids expressing the polypeptide or fragment. Drugs are screened against such transformed cells in competitive binding assays. One may measure, for example, the formulation of complexes between the agent being tested and a polypeptide of the present invention.

[0810] Thus, the present invention provides methods of screening for drugs or any other agents, which affect activities mediated by the polypeptides of the present invention. These methods comprise contacting such an agent with a polypeptide of the present invention or a fragment thereof and assaying for the presence of a complex between the agent and the polypeptide or a fragment thereof, by methods well known in the art. In such a competitive binding assay, the agents to screen are typically labeled. Following incubation, free agent is separated from that present in bound form, and the amount of free or uncomplexed label is a measure of the ability of a particular agent to bind to the polypeptides of the present invention.

[0811] Another technique for drug screening provides high throughput screening for compounds having suitable binding affinity to the polypeptides of the present invention, and is described in great detail in European Patent Application 84/03564, published on Sep. 13, 1984, which is incorporated herein by reference herein. Briefly stated, large numbers of different small peptide test compounds are synthesized on a solid substrate, such as plastic pins or some other surface. The peptide test compounds are reacted with polypeptides of the present invention and washed. Bound polypeptides are then detected by methods well known in the art. Purified polypeptides are coated directly onto plates for use in the aforementioned drug screening techniques. In addition, non-neutralizing antibodies may be used to capture the peptide and immobilize it on the solid support.

[0812] This invention also contemplates the use of competitive drug screening assays in which neutralizing antibodies capable of binding polypeptides of the present invention specifically compete with a test compound for binding to the polypeptides or fragments thereof. In this manner, the antibodies are used to detect the presence of any peptide, which shares one or more antigenic epitopes with a polypeptide of the invention.

[0813] Antisense And Ribozyme (Antagonists)

[0814] In specific embodiments, antagonists according to the present invention are nucleic acids corresponding to the sequences contained in SEQ ID NO:X, or the complementary strand thereof, and/or to cDNA sequences contained in cDNA Clone ID NO:Z identified for example, in Table 1A. In one embodiment, antisense sequence is generated internally, by the organism, in another embodiment, the antisense sequence is separately administered (see, for example, O'Connor, J., Neurochem. 56:560 (1991). Oligodeoxynucleotides as Antisense Inhibitors of Gene Expression, CRC Press, Boca Raton, Fla. (1988). Antisense technology can be used to control gene expression through antisense DNA or RNA, or through triple-helix formation. Antisense techniques are discussed for example, in Okano, J., Neurochem. 56:560 (1991); Oligodeoxynucleotides as Antisense Inhibitors of Gene Expression, CRC Press, Boca Raton, Fla. (1988). Triple helix formation is discussed in, for instance, Lee et al., Nucleic Acids Research 6:3073 (1979); Cooney et al., Science 241:456 (1988); and Dervan et al., Science 251:1300 (1991). The methods are based on binding of a polynucleotide to a complementary DNA or RNA.

[0815] For example, the use of c-myc and c-myb antisense RNA constructs to inhibit the growth of the non-lymphocytic leukemia cell line HL-60 and other cell lines was previously described. (Wickstrom et al. (1988); Anfossi et al. (1989)). These experiments were performed in vitro by incubating cells with the oligoribonucleotide. A similar procedure for in vivo use is described in WO 91/15580. Briefly, a pair of oligonucleotides for a given antisense RNA is produced as follows: A sequence complimentary to the first 15 bases of the open reading frame is flanked by an EcoR1 site on the 5′ end and a HindIII site on the 3′ end. Next, the pair of oligonucleotides is heated at 90° C. for one minute and then annealed in 2× ligation buffer (20 mM TRIS HCl pH 7.5, 10 mM MgCl2, 10 MM dithiothreitol (DTT) and 0.2 mM ATP) and then ligated to the EcoR1/Hind III site of the retroviral vector PMV7 (WO 91/15580).

[0816] For example, the 5′ coding portion of a polynucleotide that encodes the polypeptide of the present invention may be used to design an antisense RNA oligonucleotide of from about 10 to 40 base pairs in length. A DNA oligonucleotide is designed to be complementary to a region of the gene involved in transcription thereby preventing transcription and the production of the receptor. The antisense RNA oligonucleotide hybridizes to the mRNA in vivo and blocks translation of the mRNA molecule into receptor polypeptide.

[0817] In one embodiment, the antisense nucleic acid of the invention is produced intracellularly by transcription from an exogenous sequence. For example, a vector or a portion thereof, is transcribed, producing an antisense nucleic acid (RNA) of the invention. Such a vector would contain a sequence encoding the antisense nucleic acid. Such a vector can remain episomal or become chromosomally integrated, as long as it can be transcribed to produce the desired antisense RNA. Such vectors can be constructed by recombinant DNA technology methods standard in the art. Vectors can be plasmid, viral, or others known in the art, used for replication and expression in vertebrate cells. Expression of the sequence encoding the polypeptide of the present invention or fragments thereof, can be by any promoter known in the art to act in vertebrate, preferably human cells. Such promoters can be inducible or constitutive. Such promoters include, but are not limited to, the SV40 early promoter region (Bernoist and Chambon, Nature 29:304-310 (1981), the promoter contained in the 3′ long terminal repeat of Rous sarcoma virus (Yamamoto et al., Cell 22:787-797 (1980), the herpes thymidine promoter (Wagner et al., Proc. Natl. Acad. Sci. U.S.A. 78:1441-1445 (1981), the regulatory sequences of the metallothionein gene (Brinster, et al., Nature 296:39-42 (1982)), etc.

[0818] The antisense nucleic acids of the invention comprise a sequence complementary to at least a portion of an RNA transcript of a gene of the present invention. However, absolute complementarity, although preferred, is not required. A sequence “complementary to at least a portion of an RNA,” referred to herein, means a sequence having sufficient complementarity to be able to hybridize with the RNA, forming a stable duplex; in the case of double stranded antisense nucleic acids, a single strand of the duplex DNA may thus be tested, or triplex formation may be assayed. The ability to hybridize will depend on both the degree of complementarity and the length of the antisense nucleic acid. Generally, the larger the hybridizing nucleic acid, the more base mismatches with a RNA it may contain and still form a stable duplex (or triplex as the case may be). One skilled in the art can ascertain a tolerable degree of mismatch by use of standard procedures to determine the melting point of the hybridized complex.

[0819] Oligonucleotides that are complementary to the 5′ end of the message, e.g., the 5′ untranslated sequence up to and including the AUG initiation codon, should work most efficiently at inhibiting translation. However, sequences complementary to the 3′ untranslated sequences of mRNAs have been shown to be effective at inhibiting translation of mRNAs as well. See generally, Wagner, R., 1994, Nature 372:333-335. Thus, oligonucleotides complementary to either the 5′- or 3′-non-translated, non-coding regions of polynucleotide sequences described herein could be used in an antisense approach to inhibit translation of endogenous mRNA. Oligonucleotides complementary to the 5′ untranslated region of the mRNA should include the complement of the AUG start codon. Antisense oligonucleotides complementary to mRNA coding regions are less efficient inhibitors of translation but could be used in accordance with the invention. Whether designed to hybridize to the 5′-, 3′- or coding region of mRNA of the present invention, antisense nucleic acids should be at least six nucleotides in length, and are preferably oligonucleotides ranging from 6 to about 50 nucleotides in length. In specific aspects the oligonucleotide is at least 10 nucleotides, at least 17 nucleotides, at least 25 nucleotides or at least 50 nucleotides.

[0820] The polynucleotides of the invention can be DNA or RNA or chimeric mixtures or derivatives or modified versions thereof, single-stranded or double-stranded. The oligonucleotide can be modified at the base moiety, sugar moiety, or phosphate backbone, for example, to improve stability of the molecule, hybridization, etc. The oligonucleotide may include other appended groups such as peptides (e.g., for targeting host cell receptors in vivo), or agents facilitating transport across the cell membrane (see, e.g., Letsinger et al., 1989, Proc. Natl. Acad. Sci. U.S.A. 86:6553-6556; Lemaitre et al., 1987, Proc. Natl. Acad. Sci. 84:648-652; PCT Publication No. WO88/09810, published Dec. 15, 1988) or the blood-brain barrier (see, e.g., PCT Publication No. WO89/10134, published Apr. 25, 1988), hybridization-triggered cleavage agents. (See, e.g., Krol et al., 1988, BioTechniques 6:958-976) or intercalating agents. (See, e.g., Zon, 1988, Pharm. Res. 5:539-549). To this end, the oligonucleotide may be conjugated to another molecule, e.g., a peptide, hybridization triggered cross-linking agent, transport agent, hybridization-triggered cleavage agent, etc.

[0821] The antisense oligonucleotide may comprise at least one modified base moiety which is selected from the group including, but not limited to, 5-fluorouracil, 5-bromouracil, 5-chlorouracil, 5-iodouracil, hypoxanthine, xantine, 4-acetylcytosine, 5-(carboxyhydroxylmethyl) uracil, 5-carboxymethylaminomethyl-2-thiouridine, 5-carboxymethylaminomethyluracil, dihydrouracil, beta-D-galactosylqueosine, inosine, N6-isopentenyladenine, 1-methylguanine, 1-methylinosine, 2,2-dimethylguanine, 2-methyladenine, 2-methylguanine, 3-methylcytosine, 5-methylcytosine, N6-adenine, 7-methylguanine, 5-methylaminomethyluracil, 5-methoxyaminomethyl-2-thiouracil, beta-D-mannosylqueosine, 5′-methoxycarboxymethyluracil, 5-methoxyuracil, 2-methylthio-N6-isopentenyladenine, uracil-5-oxyacetic acid (v), wybutoxosine, pseudouracil, queosine, 2-thiocytosine, 5-methyl-2-thiouracil, 2-thiouracil, 4-thiouracil, 5-methyluracil, uracil-5-oxyacetic acid methylester, uracil-5-oxyacetic acid (v), 5-methyl-2-thiouracil, 3-(3-amino-3-N-2-carboxypropyl) uracil, (acp3)w, and 2,6-diaminopurine.

[0822] The antisense oligonucleotide may also comprise at least one modified sugar moiety selected from the group including, but not limited to, arabinose, 2-fluoroarabinose, xylulose, and hexose.

[0823] In yet another embodiment, the antisense oligonucleotide comprises at least one modified phosphate backbone selected from the group including, but not limited to, a phosphorothioate, a phosphorodithioate, a phosphoramidothioate, a phosphoramidate, a phosphordiamidate, a methylpbosphonate, an alkyl phosphotriester, and a formacetal or analog thereof.

[0824] In yet another embodiment, the antisense oligonucleotide is an a-anomeric oligonucleotide. An a-anomeric oligonucleotide forms specific double-stranded hybrids with complementary RNA in which, contrary to the usual b-units, the strands run parallel to each other (Gautier et al., 1987, Nucl. Acids Res. 15:6625-6641). The oligonucleotide is a 2′-O-methylribonucleotide (Inoue et al., 1987, Nucl. Acids Res. 15:6131-6148), or a chimeric RNA-DNA analogue (Inoue et al., 1987, FEBS Lett. 215:327-330).

[0825] Polynucleotides of the invention may be synthesized by standard methods known in the art, e.g. by use of an automated DNA synthesizer (such as are commercially available from Biosearch, Applied Biosystems, etc.). As examples, phosphorothioate oligonucleotides may be synthesized by the method of Stein et al. (1988, Nucl. Acids Res. 16:3209), methylphosphonate oligonucleotides can be prepared by use of controlled pore glass polymer supports (Sarin et al., 1988, Proc. Natl. Acad. Sci. U.S.A. 85:7448-7451), etc.

[0826] While antisense nucleotides complementary to the coding region sequence could be used, those complementary to the transcribed untranslated region are most preferred.

[0827] Potential antagonists according to the invention also include catalytic RNA, or a ribozyme (See, e.g., PCT International Publication WO 90/11364, published Oct. 4, 1990; Sarver et al, Science 247:1222-1225 (1990). While ribozymes that cleave mRNA at site specific recognition sequences can be used to destroy mRNAs, the use of hammerhead ribozymes is preferred. Hammerhead ribozymes cleave mRNAs at locations dictated by flanking regions that form complementary base pairs with the target mRNA. The sole requirement is that the target mRNA have the following sequence of two bases: 5′-UG-3′. The construction and production of hammerhead ribozymes is well known in the art and is described more fully in Haseloff and Gerlach, Nature 334:585-591 (1988). There are numerous potential hammerhead ribozyme cleavage sites within the nucleotide sequence of SEQ ID NO:X. Preferably, the ribozyme is engineered so that the cleavage recognition site is located near the 5′ end of the mRNA; i.e., to increase efficiency and minimize the intracellular accumulation of non-functional mRNA transcripts.

[0828] As in the antisense approach, the ribozymes of the invention can be composed of modified oligonucleotides (e.g. for improved stability, targeting, etc.) and should be delivered to cells which express in vivo. DNA constructs encoding the ribozyme may be introduced into the cell in the same manner as described above for the introduction of antisense encoding DNA. A preferred method of delivery involves using a DNA construct “encoding” the ribozyme under the control of a strong constitutive promoter, such as, for example, pol III or pol II promoter, so that transfected cells will produce sufficient quantities of the ribozyme to destroy endogenous messages and inhibit translation. Since ribozymes unlike antisense molecules, are catalytic, a lower intracellular concentration is required for efficiency.

[0829] Antagonist/agonist compounds may be employed to inhibit the cell growth and proliferation effects of the polypeptides of the present invention on neoplastic cells and tissues, i.e. stimulation of angiogenesis of tumors, and, therefore, retard or prevent abnormal cellular growth and proliferation, for example, in tumor formation or growth.

[0830] The antagonist/agonist may also be employed to prevent hyper-vascular diseases, and prevent the proliferation of epithelial lens cells after extracapsular cataract surgery. Prevention of the mitogenic activity of the polypeptides of the present invention may also be desirous in cases such as restenosis after balloon angioplasty.

[0831] The antagonist/agonist may also be employed to prevent the growth of scar tissue during wound healing.

[0832] The antagonist/agonist may also be employed to treat the diseases described herein.

[0833] Thus, the invention provides a method of treating disorders or diseases, including but not limited to the disorders or diseases listed throughout this application, associated with overexpression of a polynucleotide of the present invention by administering to a patient (a) an antisense molecule directed to the polynucleotide of the present invention, and/or (b) a ribozyme directed to the polynucleotide of the present invention.

[0834] Peptides and Other Molecules

[0835] The invention also encompasses screening methods for identifying polypeptides and nonpolypeptides that bind lung antigen polypeptides, and the lung antigen binding molecules identified thereby. These binding molecules are useful, for example, as agonists and antagonists of the lung antigen polypeptides. Such agonists and antagonists can be used, in accordance with the invention, in the therapeutic embodiments described in detail, below.

[0836] This method comprises the steps of:

[0837] contacting lung antigen polypeptides or lung antigen-like polypeptides with a plurality of molecules; and

[0838] identifying a molecule that binds the lung antigen polypeptides or lung antigen-like polypeptides.

[0839] The step of contacting the lung antigen polypeptides or lung antigen-like polypeptides with the plurality of molecules may be effected in a number of ways. For example, one may contemplate immobilizing the lung antigen polypeptides or lung antigen-like polypeptides on a solid support and bringing a solution of the plurality of molecules in contact with the immobilized lung antigen polypeptides or lung antigen-like polypeptides. Such a procedure would be akin to an affinity chromatographic process, with the affinity matrix being comprised of the immobilized lung antigen polypeptides or lung antigen-like polypeptides. The molecules having a selective affinity for the lung antigen polypeptides or lung antigen-like polypeptides can then be purified by affinity selection. The nature of the solid support, process for attachment of the lung antigen polypeptides or lung antigen-like polypeptides to the solid support, solvent, and conditions of the affinity isolation or selection are largely conventional and well known to those of ordinary skill in the art.

[0840] Alternatively, one may also separate a plurality of polypeptides into substantially separate fractions comprising a subset of or individual polypeptides. For instance, one can separate the plurality of polypeptides by gel electrophoresis, column chromatography, or like method known to those of ordinary skill for the separation of polypeptides. The individual polypeptides can also be produced by a transformed host cell in such a way as to be expressed on or about its outer surface (e.g., a recombinant phage). Individual isolates can then be “probed” by the lung antigen polypeptides or lung antigen-like polypeptides, optionally in the presence of an inducer should one be required for expression, to determine if any selective affinity interaction takes place between the lung antigen polypeptides or lung antigen-like polypeptides and the individual clone. Prior to contacting the lung antigen polypeptides or lung antigen-like polypeptides with each fraction comprising individual polypeptides, the polypeptides could first be transferred to a solid support for additional convenience. Such a solid support may simply be a piece of filter membrane, such as one made of nitrocellulose or nylon. In this manner, positive clones could be identified from a collection of transformed host cells of an expression library, which harbor a DNA construct encoding a polypeptide having a selective affinity for lung antigen polypeptides or lung antigen-like polypeptides. Furthermore, the amino acid sequence of the polypeptide having a selective affinity for the lung antigen polypeptides or lung antigen-like polypeptides can be determined directly by conventional means or the coding sequence of the DNA encoding the polypeptide can frequently be determined more conveniently. The primary sequence can then be deduced from the corresponding DNA sequence. If the amino acid sequence is to be determined from the polypeptide itself, one may use microsequencing techniques. The sequencing technique may include mass spectroscopy.

[0841] In certain situations, it may be desirable to wash away any unbound lung antigen polypeptides or lung antigen-like polypeptides, or alternatively, unbound polypeptides, from a mixture of the lung antigen polypeptides or lung antigen-like polypeptides and the plurality of polypeptides prior to attempting to determine or to detect the presence of a selective affinity interaction. Such a wash step may be particularly desirable when the lung antigen polypeptides or lung antigen-like polypeptides or the plurality of polypeptides is bound to a solid support.

[0842] The plurality of molecules provided according to this method may be provided by way of diversity libraries, such as random or combinatorial peptide or nonpeptide libraries which can be screened for molecules that specifically bind lung antigen polypeptides. Many libraries are known in the art that can be used, e.g., chemically synthesized libraries, recombinant (e.g., phage display libraries), and in vitro translation-based libraries. Examples of chemically synthesized libraries are described in Fodor et al., 1991, Science 251:767-773; Houghten et al., 1991, Nature 354:84-86; Lam et al., 1991, Nature 354:82-84; Medynski, 1994, Bio/Technology 12:709-710; Gallop et al., 1994, J. Medicinal Chemistry 37(9):1233-1251; Ohlmeyer et al., 1993, Proc. Natl. Acad. Sci. USA 90:10922-10926; Erb et al., 1994, Proc. Natl. Acad. Sci. USA 91:11422-11426; Houghten et al., 1992, Biotechniques 13:412; Jayawickreme et al., 1994, Proc. Natl. Acad. Sci. USA 91:1614-1618; Salmon et al., 1993, Proc. Natl. Acad. Sci. USA 90:11708-11712; PCT Publication No. WO 93/20242; and Brenner and Lerner, 1992, Proc. Natl. Acad. Sci. USA 89:5381-5383.

[0843] Examples of phage display libraries are described in Scott and Smith, 1990, Science 249:386-390; Devlin et al., 1990, Science, 249:404-406; Christian, R. B., et al., 1992, J. Mol. Biol. 227:711-718); Lenstra, 1992, J. Immunol. Meth. 152:149-157; Kay et al., 1993, Gene 128:59-65; and PCT Publication No. WO 94/18318 dated Aug. 18, 1994.

[0844] In vitro translation-based libraries include but are not limited to those described in PCT Publication No. WO 91/05058 dated Apr. 18, 1991; and Mattheakis et al., 1994, Proc. Natl. Acad. Sci. USA 91:9022-9026.

[0845] By way of examples of nonpeptide libraries, a benzodiazepine library (see e.g., Bunin et al., 1994, Proc. Natl. Acad. Sci. USA 91:4708-4712) can be adapted for use. Peptoid libraries (Simon et al., 1992, Proc. Natl. Acad. Sci. USA 89:9367-9371) can also be used. Another example of a library that can be used, in which the amide functionalities in peptides have been permethylated to generate a chemically transformed combinatorial library, is described by Ostresh et al. (1994, Proc. Natl. Acad. Sci. USA 91:11138-11142).

[0846] The variety of non-peptide libraries that are useful in the present invention is great. For example, Ecker and Crooke, 1995, Bio/Technology 13:351-360 list benzodiazepines, hydantoins, piperazinediones, biphenyls, sugar analogs, beta-mercaptoketones, arylacetic acids, acylpiperidines, benzopyrans, cubanes, xanthines, aminimides, and oxazolones as among the chemical species that form the basis of various libraries.

[0847] Non-peptide libraries can be classified broadly into two types: decorated monomers and oligomers. Decorated monomer libraries employ a relatively simple scaffold structure upon which a variety functional groups is added. Often the scaffold will be a molecule with a known useful pharmacological activity. For example, the scaffold might be the benzodiazepine structure.

[0848] Non-peptide oligomer libraries utilize a large number of monomers that are assembled together in ways that create new shapes that depend on the order of the monomers. Among the monomer units that have been used are carbamates, pyrrolinones, and morpholinos. Peptoids, peptide-like oligomers in which the side chain is attached to the alpha amino group rather than the alpha carbon, form the basis of another version of non-peptide oligomer libraries. The first non-peptide oligomer libraries utilized a single type of monomer and thus contained a repeating backbone. Recent libraries have utilized more than one monomer, giving the libraries added flexibility.

[0849] Screening the libraries can be accomplished by any of a variety of commonly known methods. See, e.g., the following references, which disclose screening of peptide libraries: Parmley and Smith, 1989, Adv. Exp. Med. Biol. 251:215-218; Scott and Smith, 1990, Science 249:386-390; Fowlkes et al., 1992; BioTechniques 13:422-427; Oldenburg et al., 1992, Proc. Natl. Acad. Sci. USA 89:5393-5397; Yu et al., 1994, Cell 76:933-945; Staudt et al., 1988, Science 241:577-580; Bock et al., 1992, Nature 355:564-566; Tuerk et al., 1992, Proc. Natl. Acad. Sci. USA 89:6988-6992; Ellington et al., 1992, Nature 355:850-852; U.S. Pat. No. 5,096,815, U.S. Pat. No. 5,223,409, and U.S. Pat. No. 5,198,346, all to Ladner et al.; Rebar and Pabo, 1993, Science 263:671-673; and CT Publication No. WO 94/18318.

[0850] In a specific embodiment, screening to identify a molecule that binds lung antigen polypeptides can be carried out by contacting the library members with a lung antigen polypeptides or lung antigen-like polypeptides immobilized on a solid phase and harvesting those library members that bind to the lung antigen polypeptides or lung antigen-like polypeptides. Examples of such screening methods, termed “panning” techniques are described by way of example in Parmley and Smith, 1988, Gene 73:305-318; Fowlkes et al., 1992, BioTechniques 13:422-427; International Publication No. WO 94/18318; and in references cited herein.

[0851] In another embodiment, the two-hybrid system for selecting interacting proteins in yeast (Fields and Song, 1989, Nature 340:245-246; Chien et al., 1991, Proc. Natl. Acad. Sci. USA 88:9578-9582) can be used to identify molecules that specifically bind to lung antigen polypeptides or lung antigen-like polypeptides.

[0852] Where the lung antigen binding molecule is a polypeptide, the polypeptide can be conveniently selected from any peptide library, including random peptide libraries, combinatorial peptide libraries, or biased peptide libraries. The term “biased” is used herein to mean that the method of generating the library is manipulated so as to restrict one or more parameters that govern the diversity of the resulting collection of molecules, in this case peptides.

[0853] Thus, a truly random peptide library would generate a collection of peptides in which the probability of finding a particular amino acid at a given position of the peptide is the same for all 20 amino acids. A bias can be introduced into the library, however, by specifying, for example, that a lysine occurs every fifth amino acid or that positions 4, 8, and 9 of a decapeptide library be fixed to include only arginine. Clearly, many types of biases can be contemplated, and the present invention is not restricted to any particular bias. Furthermore, the present invention contemplates specific types of peptide libraries, such as phage displayed peptide libraries and those that utilize a DNA construct comprising a lambda phage vector with a DNA insert.

[0854] As mentioned above, in the case of a lung antigen binding molecule that is a polypeptide, the polypeptide may have about 6 to less than about 60 amino acid residues, preferably about 6 to about 10 amino acid residues, and most preferably, about 6 to about 22 amino acids. In another embodiment, a lung antigen binding polypeptide has in the range of 15-100 amino acids, or 20-50 amino acids.

[0855] The selected lung antigen binding polypeptide can be obtained by chemical synthesis or recombinant expression.

[0856] Other Activities

[0857] A polypeptide, polynucleotide, agonist, or antagonist of the present invention, as a result of the ability to stimulate vascular endothelial cell growth, may be employed in treatment for stimulating re-vascularization of ischemic tissues due to various disease conditions such as thrombosis, arteriosclerosis, and other cardiovascular conditions. The polypeptide, polynucleotide, agonist, or antagonist of the present invention may also be employed to stimulate angiogenesis and limb regeneration, as discussed above.

[0858] A polypeptide, polynucleotide, agonist, or antagonist of the present invention may also be employed for treating wounds due to injuries, burns, post-operative tissue repair, and ulcers since they are mitogenic to various cells of different origins, such as fibroblast cells and skeletal muscle cells, and therefore, facilitate the repair or replacement of damaged or diseased tissue.

[0859] A polypeptide, polynucleotide, agonist, or antagonist of the present invention may also be employed to stimulate neuronal growth and to treat and prevent neuronal damage which occurs in certain neuronal disorders or neuro-degenerative conditions such as Alzheimer's disease, Parkinson's disease, and AIDS-related complex. A polypeptide, polynucleotide, agonist, or antagonist of the present invention may have the ability to stimulate chondrocyte growth; therefore, they may be employed to enhance bone and periodontal regeneration and aid in tissue transplants or bone grafts.

[0860] A polypeptide, polynucleotide, agonist, or antagonist of the present invention may be also employed to prevent skin aging due to sunburn by stimulating keratinocyte growth.

[0861] A polypeptide, polynucleotide, agonist, or antagonist of the present invention may also be employed for preventing hair loss, since FGF family members activate hair-forming cells and promotes melanocyte growth. Along the same lines, a polypeptide, polynucleotide, agonist, or antagonist of the present invention may be employed to stimulate growth and differentiation of hematopoietic cells and bone marrow cells when used in combination with other cytokines.

[0862] A polypeptide, polynucleotide, agonist, or antagonist of the present invention may also be employed to maintain organs before transplantation or for supporting cell culture of primary tissues. A polypeptide, polynucleotide, agonist, or antagonist of the present invention may also be employed for inducing tissue of mesodermal origin to differentiate in early embryos.

[0863] A polypeptide, polynucleotide, agonist, or antagonist of the present invention may also increase or decrease the differentiation or proliferation of embryonic stem cells, besides, as discussed above, hematopoietic lineage.

[0864] A polypeptide, polynucleotide, agonist, or antagonist of the present invention may also be used to modulate mammalian characteristics, such as body height, weight, hair color, eye color, skin, percentage of adipose tissue, pigmentation, size, and shape (e.g., cosmetic surgery). Similarly, a polypeptide, polynucleotide, agonist, or antagonist of the present invention may be used to modulate mammalian metabolism affecting catabolism, anabolism, processing, utilization, and storage of energy.

[0865] A polypeptide, polynucleotide, agonist, or antagonist of the present invention may be used to change a mammal's mental state or physical state by influencing biorhythms, caricadic rhythms, depression (including depressive disorders), tendency for violence, tolerance for pain, reproductive capabilities (preferably by Activin or Inhibin-like activity), hormonal or endocrine levels, appetite, libido, memory, stress, or other cognitive qualities.

[0866] A polypeptide, polynucleotide, agonist, or antagonist of the present invention may also be used as a food additive or preservative, such as to increase or decrease storage capabilities, fat content, lipid, protein, carbohydrate, vitamins, minerals, cofactors or other nutritional components.

[0867] The above-recited applications have uses in a wide variety of hosts. Such hosts include, but are not limited to, human, murine, rabbit, goat, guinea pig, camel, horse, mouse, rat, hamster, pig, micro-pig, chicken, goat, cow, sheep, dog, cat, non-human primate, and human. In specific embodiments, the host is a mouse, rabbit, goat, guinea pig, chicken, rat, hamster, pig, sheep, dog or cat. In preferred embodiments, the host is a mammal. In most preferred embodiments, the host is a human.

[0868] Other Preferred Embodiments

[0869] Other preferred embodiments of the claimed invention include an isolated nucleic acid molecule comprising a nucleotide sequence which is at least 95% identical to a sequence of at least about 50 contiguous nucleotides in the nucleotide sequence of SEQ ID NO:X or the complementary strand thereto, the nucleotide sequence as defined in column 4 of Table 1A or columns 8 and 9 of Table 2 or the complementary strand thereto, and/or cDNA contained in Clone ID NO:Z.

[0870] Also preferred is a nucleic acid molecule wherein said sequence of contiguous nucleotides is included in the nucleotide sequence of the portion of SEQ ID NO:X as defined in column 4, “ORF (From-To)”, in Table 1A.

[0871] Also preferred is a nucleic acid molecule wherein said sequence of contiguous nucleotides is included in the nucleotide sequence of the portion of SEQ ID NO:X as defined in columns 8 and 9, “NT From” and “NT To” respectively, in Table 2.

[0872] Also preferred is an isolated nucleic acid molecule comprising a nucleotide sequence which is at least 95% identical to a sequence of at least about 150 contiguous nucleotides in the nucleotide sequence of SEQ ID NO:X or the complementary strand thereto, the nucleotide sequence as defined in column 4 of Table 1A or columns 8 and 9 of Table 2 or the complementary strand thereto, and/or cDNA contained in Clone ID NO:Z.

[0873] Further preferred is an isolated nucleic acid molecule comprising a nucleotide sequence which is at least 95% identical to a sequence of at least about 500 contiguous nucleotides in the nucleotide sequence of SEQ ID NO:X or the complementary strand thereto, the nucleotide sequence as defined in column 4 of Table 1A or columns 8 and 9 of Table 2 or the complementary strand thereto, and/or cDNA contained in Clone ID NO:Z.

[0874] A further preferred embodiment is a nucleic acid molecule comprising a nucleotide sequence which is at least 95% identical to the nucleotide sequence of the portion of SEQ ID NO:X defined in column 4, “ORF (From-To)”, in Table 1A.

[0875] A further preferred embodiment is a nucleic acid molecule comprising a nucleotide sequence which is at least 95% identical to the nucleotide sequence of the portion of SEQ ID NO:X defined in columns 8 and 9, “NT From” and “NT To”, respectively, in Table 2.

[0876] A further preferred embodiment is an isolated nucleic acid molecule comprising a nucleotide sequence which is at least 95% identical to the complete nucleotide sequence of SEQ ID NO:X or the complementary strand thereto, the nucleotide sequence as defined in column 4 of Table 1A or columns 8 and 9 of Table 2 or the complementary strand thereto, and/or cDNA contained in Clone ID NO:Z.

[0877] Also preferred is an isolated nucleic acid molecule which hybridizes under stringent hybridization conditions to a nucleic acid molecule comprising a nucleotide sequence of SEQ ID NO:X or the complementary strand thereto, the nucleotide sequence as defined in column 4 of Table 1A or columns 8 and 9 of Table 2 or the complementary strand thereto, and/or cDNA contained in Clone ID NO:Z, wherein said nucleic acid molecule which hybridizes does not hybridize under stringent hybridization conditions to a nucleic acid molecule having a nucleotide sequence consisting of only A residues or of only T residues.

[0878] Also preferred is a composition of matter comprising a DNA molecule which comprises the cDNA contained in Clone ID NO:Z.

[0879] Also preferred is an isolated nucleic acid molecule comprising a nucleotide sequence which is at least 95% identical to a sequence of at least 50 contiguous nucleotides of the cDNA sequence contained in Clone ID NO:Z.

[0880] Also preferred is an isolated nucleic acid molecule, wherein said sequence of at least 50 contiguous nucleotides is included in the nucleotide sequence of an open reading frame sequence encoded by cDNA contained in Clone ID NO:Z.

[0881] Also preferred is an isolated nucleic acid molecule comprising a nucleotide sequence which is at least 95% identical to sequence of at least 150 contiguous nucleotides in the nucleotide sequence encoded by cDNA contained in Clone ID NO:Z.

[0882] A further preferred embodiment is an isolated nucleic acid molecule comprising a nucleotide sequence which is at least 95% identical to sequence of at least 500 contiguous nucleotides in the nucleotide sequence encoded by cDNA contained in Clone ID NO:Z.

[0883] A further preferred embodiment is an isolated nucleic acid molecule comprising a nucleotide sequence which is at least 95% identical to the complete nucleotide sequence encoded by cDNA contained in Clone ID NO:Z.

[0884] A further preferred embodiment is a method for detecting in a biological sample a nucleic acid molecule comprising a nucleotide sequence which is at least 95% identical to a sequence of at least 50 contiguous nucleotides in a sequence selected from the group consisting of: a nucleotide sequence of SEQ ID NO:X or the complementary strand thereto; the nucleotide sequence as defined in column 4 of Table 1A or columns 8 and 9 of Table 2 or the complementary strand thereto; and a nucleotide sequence encoded by cDNA contained in Clone ID NO:Z; which method comprises a step of comparing a nucleotide sequence of at least one nucleic acid molecule in said sample with a sequence selected from said group and determining whether the sequence of said nucleic acid molecule in said sample is at least 95% identical to said selected sequence.

[0885] Also preferred is the above method wherein said step of comparing sequences comprises determining the extent of nucleic acid hybridization between nucleic acid molecules in said sample and a nucleic acid molecule comprising said sequence selected from said group. Similarly, also preferred is the above method wherein said step of comparing sequences is performed by comparing the nucleotide sequence determined from a nucleic acid molecule in said sample with said sequence selected from said group. The nucleic acid molecules can comprise DNA molecules or RNA molecules.

[0886] A further preferred embodiment is a method for identifying the species, tissue or cell type of a biological sample which method comprises a step of detecting nucleic acid molecules in said sample, if any, comprising a nucleotide sequence that is at least 95% identical to a sequence of at least 50 contiguous nucleotides in a sequence selected from the group consisting of: a nucleotide sequence of SEQ ID NO:X or the complementary strand thereto; the nucleotide sequence as defined in column 4 of Table 1A or columns 8 and 9 of Table 2 or the complementary strand thereto; and a nucleotide sequence of the cDNA contained in Clone ID NO:Z.

[0887] The method for identifying the species, tissue or cell type of a biological sample can comprise a step of detecting nucleic acid molecules comprising a nucleotide sequence in a panel of at least two nucleotide sequences, wherein at least one sequence in said panel is at least 95% identical to a sequence of at least 50 contiguous nucleotides in a sequence selected from said group.

[0888] Also preferred is a method for diagnosing in a subject a pathological condition associated with abnormal structure or expression of a nucleotide sequence of SEQ ID NO:X or the complementary strand thereto; the nucleotide sequence as defined in column 4 of Table 1A or columns 8 and 9 of Table 2 or the complementary strand thereto; or the cDNA contained in Clone ID NO:Z which encodes a protein, wherein the method comprises a step of detecting in a biological sample obtained from said subject nucleic acid molecules, if any, comprising a nucleotide sequence that is at least 95% identical to a sequence of at least 50 contiguous nucleotides in a sequence selected from the group consisting of: a nucleotide sequence of SEQ ID NO:X or the complementary strand thereto; the nucleotide sequence as defined in column 4 of Table 1A or columns 8 and 9 of Table 2 or the complementary strand thereto; and a nucleotide sequence of cDNA contained in Clone ID NO:Z.

[0889] The method for diagnosing a pathological condition can comprise a step of detecting nucleic acid molecules comprising a nucleotide sequence in a panel of at least two nucleotide sequences, wherein at least one sequence in said panel is at least 95% identical to a sequence of at least 50 contiguous nucleotides in a sequence selected from said group.

[0890] Also preferred is a composition of matter comprising isolated nucleic acid molecules wherein the nucleotide sequences of said nucleic acid molecules comprise a panel of at least two nucleotide sequences, wherein at least one sequence in said panel is at least 95% identical to a sequence of at least 50 contiguous nucleotides in a sequence selected from the group consisting of: a nucleotide sequence of SEQ ID NO:X or the complementary strand thereto; the nucleotide sequence as defined in column 4 of Table 1A or columns 8 and 9 of Table 2 or the complementary strand thereto; and a nucleotide sequence encoded by cDNA contained in Clone ID NO:Z. The nucleic acid molecules can comprise DNA molecules or RNA molecules.

[0891] Also preferred is a composition of matter comprising isolated nucleic acid molecules wherein the nucleotide sequences of said nucleic acid molecules comprise a DNA microarray or “chip” of at least 1, 2, 3, 4, 5, 6, 7, 8, 9, 10, 15, 20, 25, 30, 40, 50, 100, 150, 200, 250, 300, 500, 1000, 2000, 3000, or 4000 nucleotide sequences, wherein at least one sequence in said DNA microarray or “chip” is at least 95% identical to a sequence of at least 50 contiguous nucleotides in a sequence selected from the group consisting of: a nucleotide sequence of SEQ ID NO:X wherein X is any integer as defined in Table 1A; and a nucleotide sequence encoded by a human cDNA clone identified by a cDNA “Clone ID” in Table 1A.

[0892] Also preferred is an isolated polypeptide comprising an amino acid sequence at least 90% identical to a sequence of at least about 10 contiguous amino acids in the polypeptide sequence of SEQ ID NO:Y; a polypeptide encoded by SEQ ID NO:X or the complementary strand thereto; the polypeptide encoded by the nucleotide sequence as defined in columns 8 and 9 of Table 2; and/or a polypeptide encoded by cDNA contained in Clone ID NO:Z.

[0893] Also preferred is an isolated polypeptide comprising an amino acid sequence at least 95% identical to a sequence of at least about 30 contiguous amino acids in the amino acid sequence of SEQ ID NO:Y; a polypeptide encoded by SEQ ID NO:X or the complementary strand thereto; the polypeptide encoded by the nucleotide sequence as defined in columns 8 and 9 of Table 2; and/or a polypeptide encoded by cDNA contained in Clone ID NO:Z.

[0894] Further preferred is an isolated polypeptide comprising an amino acid sequence at least 95% identical to a sequence of at least about 100 contiguous amino acids in the amino acid sequence of SEQ ID NO:Y; a polypeptide encoded by SEQ ID NO:X or the complementary strand thereto; the polypeptide encoded by the nucleotide sequence as defined in columns 8 and 9 of Table 2; and/or a polypeptide encoded by cDNA contained in Clone ID NO:Z.

[0895] Further preferred is an isolated polypeptide comprising an amino acid sequence at least 95% identical to the complete amino acid sequence of SEQ ID NO:Y; a polypeptide encoded by SEQ ID NO:X or the complementary strand thereto; the polypeptide encoded by the nucleotide sequence as defined in columns 8 and 9 of Table 2; and/or a polypeptide encoded by cDNA contained in Clone ID NO:Z.

[0896] Further preferred is an isolated polypeptide comprising an amino acid sequence at least 90% identical to a sequence of at least about 10 contiguous amino acids in the complete amino acid sequence of a polypeptide encoded by contained in Clone ID NO:Z

[0897] Also preferred is a polypeptide wherein said sequence of contiguous amino acids is included in the amino acid sequence of a portion of said polypeptide encoded by cDNA contained in Clone ID NO:Z; a polypeptide encoded by SEQ ID NO:X or the complementary strand thereto; the polypeptide encoded by the nucleotide sequence as defined in columns 8 and 9 of Table 2; and/or the polypeptide sequence of SEQ ID NO:Y.

[0898] Also preferred is an isolated polypeptide comprising an amino acid sequence at least 95% identical to a sequence of at least about 30 contiguous amino acids in the amino acid sequence of a polypeptide encoded by the cDNA contained in Clone ID NO:Z.

[0899] Also preferred is an isolated polypeptide comprising an amino acid sequence at least 95% identical to a sequence of at least about 100 contiguous amino acids in the amino acid sequence of a polypeptide encoded by cDNA contained in Clone ID NO:Z.

[0900] Also preferred is an isolated polypeptide comprising an amino acid sequence at least 95% identical to the amino acid sequence of a polypeptide encoded by the cDNA contained in Clone ID NO:Z.

[0901] Further preferred is an isolated antibody which binds specifically to a polypeptide comprising an amino acid sequence that is at least 90% identical to a sequence of at least 10 contiguous amino acids in a sequence selected from the group consisting of: a polypeptide sequence of SEQ ID NO:Y; a polypeptide encoded by SEQ ID NO:X or the complementary strand thereto; the polypeptide encoded by the nucleotide sequence as defined in columns 8 and 9 of Table 2; and a polypeptide encoded by the cDNA contained in Clone ID NO:Z.

[0902] Further preferred is a method for detecting in a biological sample a polypeptide comprising an amino acid sequence which is at least 90% identical to a sequence of at least 10 contiguous amino acids in a sequence selected from the group consisting of: a polypeptide sequence of SEQ ID NO:Y; a polypeptide encoded by SEQ ID NO:X or the complementary strand thereto; the polypeptide encoded by the nucleotide sequence as defined in columns 8 and 9 of Table 2; and a polypeptide encoded by the cDNA contained in Clone ID NO:Z; which method comprises a step of comparing an amino acid sequence of at least one polypeptide molecule in said sample with a sequence selected from said group and determining whether the sequence of said polypeptide molecule in said sample is at least 90% identical to said sequence of at least 10 contiguous amino acids.

[0903] Also preferred is the above method wherein said step of comparing an amino acid sequence of at least one polypeptide molecule in said sample with a sequence selected from said group comprises determining the extent of specific binding of polypeptides in said sample to an antibody which binds specifically to a polypeptide comprising an amino acid sequence that is at least 90% identical to a sequence of at least 10 contiguous amino acids in a sequence selected from the group consisting of: a polypeptide sequence of SEQ ID NO:Y; a polypeptide encoded by SEQ ID NO:X or the complementary strand thereto; the polypeptide encoded by the nucleotide sequence as defined in columns 8 and 9 of Table 2; and a polypeptide encoded by the cDNA contained in Clone ID NO:Z.

[0904] Also preferred is the above method wherein said step of comparing sequences is performed by comparing the amino acid sequence determined from a polypeptide molecule in said sample with said sequence selected from said group.

[0905] Also preferred is a method for identifying the species, tissue or cell type of a biological sample which method comprises a step of detecting polypeptide molecules in said sample, if any, comprising an amino acid sequence that is at least 90% identical to a sequence of at least 10 contiguous amino acids in a sequence selected from the group consisting of: polypeptide sequence of SEQ ID NO:Y; a polypeptide encoded by SEQ ID NO:X or the complementary strand thereto; the polypeptide encoded by the nucleotide sequence as defined in columns 8 and 9 of Table 2; and a polypeptide encoded by the cDNA contained in Clone ID NO:Z.

[0906] Also preferred is the above method for identifying the species, tissue or cell type of a biological sample, which method comprises a step of detecting polypeptide molecules comprising an amino acid sequence in a panel of at least two amino acid sequences, wherein at least one sequence in said panel is at least 90% identical to a sequence of at least 10 contiguous amino acids in a sequence selected from the above group.

[0907] Also preferred is a method for diagnosing in a subject a pathological condition associated with abnormal structure or expression of a nucleic acid sequence identified in Table 1A or Table 2 encoding a polypeptide, which method comprises a step of detecting in a biological sample obtained from said subject polypeptide molecules comprising an amino acid sequence in a panel of at least two amino acid sequences, wherein at least one sequence in said panel is at least 90% identical to a sequence of at least 10 contiguous amino acids in a sequence selected from the group consisting of: polypeptide sequence of SEQ ID NO:Y; a polypeptide encoded by SEQ ID NO:X or the complementary strand thereto; the polypeptide encoded by the nucleotide sequence as defined in columns 8 and 9 of Table 2; and a polypeptide encoded by the cDNA contained in Clone ID NO:Z.

[0908] In any of these methods, the step of detecting said polypeptide molecules includes using an antibody.

[0909] Also preferred is an isolated nucleic acid molecule comprising a nucleotide sequence which is at least 95% identical to a nucleotide sequence encoding a polypeptide wherein said polypeptide comprises an amino acid sequence that is at least 90% identical to a sequence of at least 10 contiguous amino acids in a sequence selected from the group consisting of: polypeptide sequence of SEQ ID NO:Y; a polypeptide encoded by SEQ ID NO:X or the complementary strand thereto; the polypeptide encoded by the nucleotide sequence as defined in columns 8 and 9 of Table 2; and a polypeptide encoded by the cDNA contained in Clone ID NO:Z.

[0910] Also preferred is an isolated nucleic acid molecule, wherein said nucleotide sequence encoding a polypeptide has been optimized for expression of said polypeptide in a prokaryotic host.

[0911] Also preferred is a polypeptide molecule, wherein said polypeptide comprises an amino acid sequence selected from the group consisting of: polypeptide sequence of SEQ ID NO:Y; a polypeptide encoded by SEQ ID NO:X or the complementary strand thereto; the polypeptide encoded by the nucleotide sequence as defined in columns 8 and 9 of Table 2; and a polypeptide encoded by the cDNA contained in Clone ID NO:Z.

[0912] Further preferred is a method of making a recombinant vector comprising inserting any of the above isolated nucleic acid molecule into a vector. Also preferred is the recombinant vector produced by this method. Also preferred is a method of making a recombinant host cell comprising introducing the vector into a host cell, as well as the recombinant host cell produced by this method.

[0913] Also preferred is a method of making an isolated polypeptide comprising culturing this recombinant host cell under conditions such that said polypeptide is expressed and recovering said polypeptide. Also preferred is this method of making an isolated polypeptide, wherein said recombinant host cell is a eukaryotic cell and said polypeptide is a human protein comprising an amino acid sequence selected from the group consisting of: polypeptide sequence of SEQ ID NO:Y; a polypeptide encoded by SEQ ID NO:X or the complementary strand thereto; the polypeptide encoded by the nucleotide sequence as defined in columns 8 and 9 of Table 2; and a polypeptide encoded by the cDNA contained in Clone ID NO:Z. The isolated polypeptide produced by this method is also preferred.

[0914] Also preferred is a method of treatment of an individual in need of an increased level of a protein activity, which method comprises administering to such an individual a Therapeutic comprising an amount of an isolated polypeptide, polynucleotide, immunogenic fragment or analogue thereof, binding agent, antibody, or antigen binding fragment of the claimed invention effective to increase the level of said protein activity in said individual.

[0915] Also preferred is a method of treatment of an individual in need of a decreased level of a protein activity, which method comprised administering to such an individual a Therapeutic comprising an amount of an isolated polypeptide, polynucleotide, immunogenic fragment or analogue thereof, binding agent, antibody, or antigen binding fragment of the claimed invention effective to decrease the level of said protein activity in said individual.

[0916] Also preferred is a method of treatment of an individual in need of a specific delivery of toxic compositions to diseased cells (e.g., tumors, leukemias or lymphomas), which method comprises administering to such an individual a Therapeutic comprising an amount of an isolated polypeptide of the invention, including, but not limited to a binding agent, or antibody of the claimed invention that are associated with toxin or cytotoxic prodrugs.

[0917] Having generally described the invention, the same will be more readily understood by reference to the following examples, which are provided by way of illustration and are not intended as limiting.

TABLE 6

| ATCC Deposits | Deposit Date | ATCC Designation Number |
|---|---|---|
| LP01, LP02, LP03, | May-20-97 | 209059, 209060, 209061, 209062, |
| LP04, LP05, LP06, | | 209063, 209064, 209065, 209066, |
| LP07, LP08, LP09, | | 209067, 209068, 209069 |
| LP10, LP11, | | |
| LP12 | Jan-12-98 | 209579 |
| LP13 | Jan-12-98 | 209578 |
| LP14 | Jul-16-98 | 203067 |
| LP15 | Jul-16-98 | 203068 |
| LP16 | Feb-1-99 | 203609 |
| LP17 | Feb-1-99 | 203610 |
| LP20 | Nov-17-98 | 203485 |
| LP21 | Jun-18-99 | PTA-252 |
| LP22 | Jun-18-99 | PTA-253 |
| LP23 | Dec-22-99 | PTA-1081 |

### EXAMPLES

### Example 1

### Isolation of a Selected cDNA Clone from the Deposited Sample

[0918] Each Clone ID NO:Z is contained in a plasmid. Table 7 identifies the vectors used to construct the cDNA library from which each clone was isolated. In many cases, the vector used to construct the library is a phage vector from which a plasmid has been excised. The following correlates the related plasmid for each phage vector used in constructing the cDNA library. For example, where a particular clone is identified in Table 7 as being isolated in the vector “Lambda Zap,” the corresponding deposited clone is in “pBluescript.”

| Vector Used to Construct Library | Corresponding Deposited Plasmid |
|---|---|
| Lambda Zap | pBluescript (pBS) |
| Uni-Zap XR | pBluescript (pBS) |
| Zap Express | pBK |
| lafmid BA | plafmid BA |
| pSport1 | pSport1 |
| pCMVSport 2.0 | pCMVSport 2.0 |
| pCMVSport 3.0 | pCMVSport 3.0 |
| pCR ® 2.1 | pCR ® 2.1 |

[0919] Vectors Lambda Zap (U.S. Pat. Nos. 5,128,256 and 5,286,636), Uni-Zap XR (U.S. Pat. Nos. 5,128,256 and 5,286,636), Zap Express (U.S. Pat. Nos. 5,128,256 and 5,286,636), pBluescript (pBS) (Short, J. M. et al., Nucleic Acids Res. 16:7583-7600 (1988); Alting-Mees, M. A. and Short, J. M., Nucleic Acids Res. 17:9494 (1989)) and pBK (Alting-Mees, M. A. et al., Strategies 5:58-61 (1992)) are commercially available from Stratagene Cloning Systems, Inc., 11011 N. Torrey Pines Road, La Jolla, Calif., 92037. pBS contains an ampicillin resistance gene and pBK contains a neomycin resistance gene. Both can be transformed into E. coli strain XL-1 Blue, also available from Stratagene. pBS comes in 4 forms SK+, SK−, KS+and KS. The S and K refers to the orientation of the polylinker to the T7 and T3 primer sequences which flank the polylinker region (“S” is for SacI and “K” is for KpnI which are the first sites on each respective end of the linker). “+” or “−” refer to the orientation of the f1 origin of replication (“ori”), such that in one orientation, single stranded rescue initiated from the f1 ori generates sense strand DNA and in the other, antisense.

[0920] Vectors pSport1, pCMVSport 2.0 and pCMVSport 3.0, were obtained from Life Technologies, Inc., P. O. Box 6009, Gaithersburg, Md. 20897. All Sport vectors contain an ampicillin resistance gene and may be transformed into E. coli strain DH10B, also available from Life Technologies. (See, for instance, Gruber, C. E., et al., Focus 15:59 (1993).) Vector lafmid BA (Bento Soares, Columbia University, NY) contains an ampicillin resistance gene and can be transformed into E. coli strain XL-1 Blue. Vector pCR® 2.1, which is available from Invitrogen, 1600 Faraday Avenue, Carlsbad, Calif. 92008, contains an ampicillin resistance gene and may be transformed into E. coli strain DH10B, available from Life Technologies. (See, for instance, Clark, J. M., Nuc. Acids Res. 16:9677-9686 (1988) and Mead, D. et al., Bio/Technology 9: (1991).) Preferably, a polynucleotide of the present invention does not comprise the vector sequences identified for the particular clone in Table 7, as well as the corresponding plasmid vector sequences designated above.

[0921] The deposited material in the sample assigned the ATCC Deposit Number cited by reference to Tables 1, 2, 6 and 7 for any given cDNA clone also may contain one or more additional plasmids, each comprising a cDNA clone different from that given clone. Thus, deposits sharing the same ATCC Deposit Number contain at least a plasmid for each Clone ID NO:Z.

TABLE 7

| | | | ATCC |
|---|---|---|---|
| Libraries owned by Catalog | Catalog Description | Vector | Deposit |
| HUKA HUKB HUKC HUKD HUKE | Human Uterine Cancer | Lambda ZAP II | LP01 |
| HUKF HUKG | | | |
| HCNA HCNB | Human Colon | Lambda Zap II | LP01 |
| HFFA | Human Fetal Brain, random primed | Lambda Zap II | LP01 |
| HTWA | Resting T-Cell | Lambda ZAP II | LP01 |
| HBQA | Early Stage Human Brain, random | Lambda ZAP II | LP01 |
| | primed | | |
| HLMB HLMF HLMG HLMH HLMI | breast lymph node CDNA library | Lambda ZAP II | LP01 |
| HLMJ HLMM HLMN | | | |
| HCQA HCQB | human colon cancer | Lamda ZAP II | LP01 |
| HMEA HMEC HMED HMEE | Human Microvascular Endothelial | Lambda ZAP II | LP01 |
| HMEF HMEG HMEI HMEJ HMEK | Cells, fract. A | | |
| HMEL | | | |
| HUSA HUSC | Human Umbilical Vein Endothelial | Lambda ZAP II | LP01 |
| | Cells, fract. A | | |
| HLQA HLQB | Hepatocellular Tumor | Lambda ZAP II | LP01 |
| HHGA HHGB HHGC HHGD | Hemangiopericytoma | Lambda ZAP II | LP01 |
| HSDM | Human Striatum Depression, re-rescue | Lambda ZAP II | LP01 |
| HUSH | H Umbilical Vein Endothelial Cells, | Lambda ZAP II | LP01 |
| | frac A, re-excision | | |
| HSGS | Salivary gland, subtracted | Lambda ZAP II | LP01 |
| HFXA HFXB HFXC HFXD HFXE | Brain frontal cortex | Lambda ZAP II | LP01 |
| HFXF HFXG HFXH | | | |
| HPQA HPQB HPQC | PERM TF274 | Lambda ZAP II | LP01 |
| HFXJ HFXK | Brain Frontal Cortex, re-excision | Lambda ZAP II | LP01 |
| HCWA HCWB HCWC HCWD | CD34 positive cells (Cord Blood) | ZAP Express | LP02 |
| HCWE HCWF HCWG HCWH | | | |
| HCWI HCWJ HCWK | | | |
| HCUA HCUB HCUC | CD34 depleted Buffy Coat (Cord | ZAP Express | LP02 |
| | Blood) | | |
| HRSM | A-14 cell line | ZAP Express | LP02 |
| HRSA | A1-CELL LINE | ZAP Express | LP02 |
| HCUD HCUE HCUF HCUG HCUH | CD34 depleted Buffy Coat (Cord | ZAP Express | LP02 |
| HCUI | Blood), re-excision | | |
| HBXE HBXF HBXG | H. Whole Brain #2, re-excision | ZAP Express | LP02 |
| HRLM | L8 cell line | ZAP Express | LP02 |
| HBXA HBXB HBXC HBXD | Human Whole Brain #2 - Oligo dT > | ZAP Express | LP02 |
| | 1.5 Kb | | |
| HUDA HUDB HUDC | Testes | ZAP Express | LP02 |
| HHTM HHTN HHTO | H. hypothalamus, frac A; re-excision | ZAP Express | LP02 |
| HHTL | H. hypothalamus, frac A | ZAP Express | LP02 |
| HASA HASD | Human Adult Spleen | Uni-ZAP XR | LP03 |
| HFKC HFKD HFKE HFKF HFKG | Human Fetal Kidney | Uni-ZAP XR | LP03 |
| HE8A HE8B HE8C HE8D HE8E | Human 8 Week Whole Embryo | Uni-ZAP XR | LP03 |
| HE8F HE8M HE8N | | | |
| HGBA HGBD HGBE HGBF HGBG | Human Gall Bladder | Uni-ZAP XR | LP03 |
| HGBH HGBI | | | |
| HLHA HLHB HLHC HLHD HLHE | Human Fetal Lung III | Uni-ZAP XR | LP03 |
| HLHF HLHG HLHH HLHQ | | | |
| HPMA HPMB HPMC HPMD HPME | Human Placenta | Uni-ZAP XR | LP03 |
| HPMF HPMG HPMH | | | |
| HPRA HPRB HPRC HPRD | Human Prostate | Uni-ZAP XR | LP03 |
| HSIA HSIC HSID HSIE | Human Adult Small Intestine | Uni-ZAP XR | LP03 |
| HTEA HTEB HTEC HTED HTEE | Human Testes | Uni-ZAP XR | LP03 |
| HTEF HTEG HTEH HTEI HTEJ | | | |
| HTEK | | | |
| HTPA HTPB HTPC HTPD HTPE | Human Pancreas Tumor | Uni-ZAP XR | LP03 |
| HTTA HTTB HTTC HTTD HTTE | Human Testes Tumor | Uni-ZAP XR | LP03 |
| HTTF | | | |
| HAPA HAPB HAPC HAPM | Human Adult Pulmonary | Uni-ZAP XR | LP03 |
| HETA HETB HETC HETD HETE | Human Endometrial Tumor | Uni-ZAP XR | LP03 |
| HETF HETG HETH HETI | | | |
| HHFB HHFC HHFD HHFE HHFF | Human Fetal Heart | Uni-ZAP XR | LP03 |
| HHFG HHFH HHFI | | | |
| HHPB HHPC HHPD HHPE HHPF | Human Hippocampus | Uni-ZAP XR | LP03 |
| HHPG HHPH | | | |
| HCE1 HCE2 HCE3 HCE4 HCE5 | Human Cerebellum | Uni-ZAP XR | LP03 |
| HCEB HCEC HCED HCEE HCEF | | | |
| HCEG | | | |
| HUVB HUVC HUVD HUVE | Human Umbilical Vein, Endo. remake | Uni-ZAP XR | LP03 |
| HSTA HSTB HSTC HSTD | Human Skin Tumor | Uni-ZAP XR | LP03 |
| HTAA HTAB HTAC HTAD HTAE | Human Activated T-Cells | Uni-ZAP XR | LP03 |
| HFEA HFEB HFEC | Human Fetal Epithelium (Skin) | Uni-ZAP XR | LP03 |
| HJPA HJPB HJPC HJPD | HUMAN JURKAT MEMBRANE | Uni-ZAP XR | LP03 |
| | BOUND POLYSOMES | | |
| HESA | Human epithelioid sarcoma | Uni-Zap XR | LP03 |
| HLTA HLTB HLTC HLTD HLTE | Human T-Cell Lymphoma | Uni-ZAP XR | LP03 |
| HLTF | | | |
| HFTA HFTB HFTC HFTD | Human Fetal Dura Mater | Uni-ZAP XR | LP03 |
| HRDA HRDB HRDC HRDD HRDE | Human Rhabdomyosarcoma | Uni-ZAP XR | LP03 |
| HRDF | | | |
| HCAA HCAB HCAC | Cem cells cyclohexamide treated | Uni-ZAP XR | LP03 |
| HRGA HRGB HRGC HRGD | Raji Cells, cyclohexamide treated | Uni-ZAP XR | LP03 |
| HSUA HSUB HSUC HSUM | Supt Cells, cyclohexamide treated | Uni-ZAP XR | LP03 |
| HT4A HT4C HT4D | Activated T-Cells, 12 hrs. | Uni-ZAP XR | LP03 |
| HE9A HE9B HE9C HE9D HE9E | Nine Week Old Early Stage Human | Uni-ZAP XR | LP03 |
| HE9F HE9G HE9H HE9M HE9N | | | |
| HATA HATB HATC HATD HATE | Human Adrenal Gland Tumor | Uni-ZAP XR | LP03 |
| HT5A | Activated T-Cells, 24 hrs. | Uni-ZAP XR | LP03 |
| HFGA HFGM | Human Fetal Brain | Uni-ZAP XR | LP03 |
| HNEA HNEB HNEC HNED HNEE | Human Neutrophil | Uni-ZAP XR | LP03 |
| HBGB HBGD | Human Primary Breast Cancer | Uni-ZAP XR | LP03 |
| HBNA HBNB | Human Normal Breast Uni-ZAP XR | LP03 | |
| HCAS | Cern Cells, cyclohexamide treated, | Uni-ZAP XR | LP03 |
| | subtra | | |
| HHPS | Human Hippocampus, subtracted | pBS | LP03 |
| HKCS HKCU | Human Colon Cancer, subtracted | pBS | LP03 |
| HRGS | Raji cells, cyclohexamide treated, | pBS | LP03 |
| | subtracted | | |
| HSUT | Supt cells, cyclohexamide treated, | pBS | LP03 |
| | differentially expressed | | |
| HT4S | Activated T-Cells, 12 hrs, subtracted | Uni-ZAP XR | LP03 |
| HCDA HCDB HCDC HCDD HCDE | Human Chondrosarcoma | Uni-ZAP XR | LP03 |
| HOAA HOAB HOAC | Human Osteosarcoma | Uni-ZAP XR | LP03 |
| HTLA HTLB HTLC HTLD HTLE | Human adult testis, large inserts | Uni-ZAP XR | LP03 |
| HTLF | | | |
| HLMA HLMC HLMD | Breast Lymph node cDNA library | Uni-ZAP XR | LP03 |
| H6EA H6EB H6EC | HL-60, PMA 4H | Uni-ZAP XR | LP03 |
| HTXA HTXB HTXC HTXD HTXE | Activated T-Cell (12 hs)/Thiouridine | Uni-ZAP XR | LP03 |
| HTXF HTXG HTXH | labelledEco | | |
| HNFA HNFB HNFC HNFD HNFE | Human Neutrophil, Activated | Uni-ZAP XR | LP03 |
| HNFF HNFG HNFH HNFJ | | | |
| HTOB HTOC | HUMAN TONSILS, FRACTION 2 | Uni-ZAP XR | LP03 |
| HMGB | Human OB MG63 control fraction I | Uni-ZAP XR | LP03 |
| HOPB | Human OB HOS control fraction I | Uni-ZAP XR | LP03 |
| HORB | Human OB HOS treated (10 nM E2) | Uni-ZAP XR | LP03 |
| | fraction I | | |
| HSVA HSVB HSVC | Human Chronic Synovitis | Uni-ZAP XR | LP03 |
| HROA | HUMAN STOMACH | Uni-ZAP XR | LP03 |
| HBJA HBJB HBJC HBJD HBJE | HUMAN B CELL LYMPHOMA | Uni-ZAP XR | LP03 |
| HBJF HBJG HBJH HBJI HBJJ | | | |
| HBJK | | | |
| HCRA HCRB HCRC | human corpus colosum | Uni-ZAP XR | LP03 |
| HODA HODB HODC HODD | human ovarian cancer | Uni-ZAP XR | LP03 |
| HDSA | Dermatofibrosarcoma Protuberance | Uni-ZAP XR | LP03 |
| HMWA HMWB HMWC HMWD | Bone Marrow Cell Line (RS4; 11) | Uni-ZAP XR | LP03 |
| HMWE HMWF HMWG HMWH | | | |
| HMWI HMWJ | | | |
| HSOA | stomach cancer (human) | Uni-ZAP XR | LP03 |
| HERA | SKIN | Uni-ZAP XR | LP03 |
| HMDA | Brain-medulloblastoma | Uni-ZAP XR | LP03 |
| HOLA HGLB HGLD | Glioblastoma | Uni-ZAP XR | LP03 |
| HEAA | H. Atrophic Endometrium | Uni-ZAP XR | LP03 |
| HBCA HBCB | H. Lymph node breast Cancer | Uni-ZAP XR | LP03 |
| HPWT | Human Prostate BPH, re-excision | Uni-ZAP XR | LP03 |
| HFVG HFVH HFVI | Fetal Liver, subtraction II | pBS | LP03 |
| HNFI | Human Neutrophils, Activated, re- | pBS | LP03 |
| | excision | | |
| HBMB HBMC HBMD | Human Bone Marrow, re-excision | pBS | LP03 |
| HKML HKMM HKMN | H. Kidney Medulla, re-excision | pBS | LP03 |
| HKIX HKIY | H. Kidney Cortex, subtracted | pBS | LP03 |
| HADT | H. Amygdala Depression, subtracted | pBS | LP03 |
| H6AS | HI-60, untreated, subtracted | Uni-ZAP XR | LP03 |
| H6ES | HL-60, PMA 4H, subtracted | Uni-ZAP XR | LP03 |
| H6BS | HL-60, RA 4h, Subtracted | Uni-ZAP XR | LP03 |
| H6CS | HL-60, PMA 1d, subtracted | Uni-ZAP XR | LP03 |
| HTXJ HTXK | Activated T-cell (12h)/Thiouridine-re- | Uni-ZAP XR | LP03 |
| | excision | | |
| HMSA HMSB HMSC HMSD HMSE | Monocyte activated | Uni-ZAP XR | LP03 |
| HMSF HMSG HMSH HMSI HMSJ | | | |
| HMSK | | | |
| HAGA HAGB HAGC HAGD HAGE | Human Amygdala | Uni-ZAP XR | LP03 |
| HAGF | | | |
| HSRA HSRB HSRE | STROMAL -OSTEOCLASTOMA | Uni-ZAP XR | LP03 |
| HSRD HSRF HSRG HSRH | Human Osteoclastoma Stromal Cells - | Uni-ZAP XR | LP03 |
| | unamplified | | |
| HSQA HSQB HSQC HSQD HSQE | Stromal cell TF274 | Uni-ZAP XR | LP03 |
| HSQF HSQG | | | |
| HSKA HSKB HSKC HSKD HSKE | Smooth muscle, serum treated | Uni-ZAP XR | LP03 |
| HSKF HSKZ | | | |
| HSLA HSLB HSLC HSLD HSLE | Smooth muscle, control | Uni-ZAP XR | LP03 |
| HSLF HSLG | | | |
| HSDA HSDD HSDE HSDF HSDG | Spinal cord | Uni-ZAP XR | LP03 |
| HSDH | | | |
| HPWS | Prostate-BPH subtracted II | pBS | LP03 |
| HSKW HSKX HSKY | Smooth Muscle- HASTE normalized | pBS | LP03 |
| HFPB HFPC HFPD | H. Frontal cortex, epileptic; re-excision | Uni-ZAP XR | LP03 |
| HSDI HSDJ HSDK | Spinal Cord, re-excision | Uni-ZAP XR | LP03 |
| HSKN HSKO | Smooth Muscle Serum Treated, Norm | pBS | LP03 |
| HSKG HSKH HSKI | Smooth muscle, serum induced, re-exc | pBS | LP03 |
| HFCA HFCB HFCC HFCD HFCE | Human Fetal Brain | Uni-ZAP XR | LP04 |
| HFCF | | | |
| HPTA HPTB HPTD | Human Pituitary | Uni-ZAP XR | LP04 |
| HTHB HTHC HTHD | Human Thymus | Uni-ZAP XR | LP04 |
| HE6B HE6C HE6D HE6E HE6F | Human Whole Six Week Old Embryo | Uni-ZAP XR | LP04 |
| HE6G HE6S | | | |
| HSSA HSSB HSSC HSSD HSSE | Human Synovial Sarcoma | Uni-ZAP XR | LP04 |
| HSSF HSSG HSSH HSSI HSSJ | | | |
| HSSK | | | |
| HE7T | 7 Week Old Early Stage Human, | Uni-ZAP XR | LP04 |
| | subtracted | | |
| HEPA HEPB HEPC | Human Epididymus | Uni-ZAP XR | LP04 |
| HSNA HSNB HSNC HSNM HSNN | Human Synovium | Uni-ZAP XR | LP04 |
| HPFB HPFC HPFD HPFE | Human Prostate Cancer, Stage C | Uni-ZAP XR | LP04 |
| | fraction | | |
| HE2A HE2D HE2E HE2H HE2I | 12 Week Old Early Stage Human | Uni-ZAP XR | LP04 |
| HE2M HE2N HE2O | | | |
| HE2B HE2C HE2F HE2G HE2P | 12 Week Old Early Stage Human, II | Uni-ZAP XR | LP04 |
| HE2Q | | | |
| HPTS HPTT HPTU | Human Pituitary, subtracted | Uni-ZAP XR | LP04 |
| HAUA HAUB HAUC | Amniotic Cells - TNF induced | Uni-ZAP XR | LP04 |
| HAQA HAQB HAQC HAQD | Amniotic Cells - Primary Culture | Uni-ZAP XR | LP04 |
| HWTA HWTB HWTC | wilm's tumor | Uni-ZAP XR | LP04 |
| HBSD | Bone Cancer, re-excision | Uni-ZAP XR | LP04 |
| HSGB | Salivary gland, re-excision | Uni-ZAP XR | LP04 |
| HSJA HSJB HSJC | Smooth muscle-ILb induced | Uni-ZAP XR | LP04 |
| HSXA HSXB HSXC HSXD | Human Substantia Nigra | Uni-ZAP XR | LP04 |
| HSHA HSHB HSHC | Smooth muscle, IL1b induced | Uni-ZAP XR | LP04 |
| HOUA HOUB HOUC HOUD HOUE | Adipocytes | Uni-ZAP XR | LP04 |
| HPWA HPWB HPWC HPWD | Prostate BPH | Uni-ZAP XR | LP04 |
| HPWE | | | |
| HELA HELB HELC HELD HELE | Endothelial cells-control | Uni-ZAP XR | LP04 |
| HELF HELG HELH | | | |
| HEMA HEMB HEMC HEMD | Endothelial-induced | Uni-ZAP XR | LP04 |
| HEME HEMF HEMG HEMH | | | |
| HBIA HBIB HBIC | Human Brain, Striatum | Uni-ZAP XR | LP04 |
| HHSA HHSB HHSC HHSD HHSE | Human Hypothalmus, Schizophrenia | Uni-ZAP XR | LP04 |
| HNGA HNGB HNGC HNGD HNGE | neutrophils control | Uni-ZAP XR | LP04 |
| HNGF HNGG HNGH HNGI HNGJ | | | |
| HNHA HNHB HNHC HNHD HNHE | Neutrophils IL-1 and LPS induced | Uni-ZAP XR | LP04 |
| HNHF HNHG HNHH HNHI HNHJ | | | |
| HSDB HSDC | STRIATUM DEPRESSION | Uni-ZAP XR | LP04 |
| HHPT | Hypothalamus | Uni-ZAP XR | LP04 |
| HSAT HSAU HSAV HSAW HSAX | Anergic T-cell | Uni-ZAP XR | LP04 |
| HSAY HSAZ | | | |
| HBMS HBMT HBMU HBMV | Bone marrow | Uni-ZAP XR | LP04 |
| HBMW HBMX | | | |
| HOEA HOEB HOEC HOED HOEE | Osteoblasts | Uni-ZAP XR | LP04 |
| HOEF HOEJ | | | |
| HAIA HAIB HAIC HAID HAIE | Epithelial-TNFa and INF induced | Uni-ZAP XR | LP04 |
| HAIF | | | |
| HTGA HTGB HTGC HTGD | Apoptotic T-cell | Uni-ZAP XR | LP04 |
| HMCA HMCB HMCC HMCD | Macrophage-oxLDL | Uni-ZAP XR | LP04 |
| HMCE | | | |
| HMAA HMAB HMAC HMAD | Macrophage (GM-CSF treated) | Uni-ZAP XR | LP04 |
| HMAF HMAF HMAG | | | |
| HPHA | Normal Prostate | Uni-ZAP XR | LP04 |
| HPIA HPIB HPIC | LNCAP prostate cell line | Uni-ZAP XR | LP04 |
| HPJA HPJB HPJC | PC3 Prostate cell line | Uni-ZAP XR | LP04 |
| HOSE HOSF HOSG | Human Osteoclastoma, re-excision | Uni-ZAP XR | LP04 |
| HTGE HTGF | Apoptotic T-cell, re-excision | Uni-ZAP XR | LP04 |
| HMAJ HMAK | H Macrophage (GM-CSF treated), re- | Uni-ZAP XR | LP04 |
| | excision | | |
| HACB HACC HACD | Human Adipose Tissue, re-excision | Uni-ZAP XR | LP04 |
| HFPA | H. Frontal Cortex, Epileptic | Uni-ZAP XR | LP04 |
| HFAA HFAB HFAC HFAD HFAE | Alzheimers, spongy change | Uni-ZAP XR | LP04 |
| HFAM | Frontal Lobe, Dementia | Uni-ZAP XR | LP04 |
| HMIA HMIB HMIC | Human Manic Depression Tissue | Uni-ZAP XR | LP04 |
| HTSA HTSE HTSF HTSG HTSH | Human Thymus | pBS | LP05 |
| HPBA HPBB HPBC HPBD HPBE | Human Pineal Gland | pBS | LP05 |
| HSAA HSAB HSAC | HSA 172 Cells | pBS | LP05 |
| HSBA HSBB HSBC HSBM | HSC172 cells | pBS | LP05 |
| HJAA HJAB HJAC HJAD | Jurkat T-cell G1 phase | pBS | LP05 |
| HJBA HJBB HJBC HJBD | Jurkat T-Cell, S phase | pBS | LP05 |
| HAFA HAFB | Aorta endothelial cells + TNF-a | pBS | LP05 |
| HAWA HAWB HAWC | Human White Adipose | pBS | LP05 |
| HTNA HTNB | Human Thyroid | pBS | LP05 |
| HONA | Normal Ovary, Premenopausal | pBS | LP05 |
| HARA HARB | Human Adult Retina | pBS | LP05 |
| HLJA HLJB | Human Lung | pCMVSport 1 | LP06 |
| HOFM HOFN HOFO | H. Ovarian Tumor, II, OV5232 | pCMVSport 2.0 | LP07 |
| HOGA HOGB HOGC | OV 10-3-95 | pCMVSport 2.0 | LP07 |
| HCGL | CD34+ cells, II | pCMVSport 2.0 | LP07 |
| HDLA | Hodgkin's Lymphoma I | pCMVSport 2.0 | LP07 |
| HDTA HDTB HDTC HDTD HDTE | Hodgkin's Lymphoma II | pCMVSport 2.0 | LP07 |
| HKAA HKAB HKAC HKAD HKAE | Keratinocyte | pCMVSport2.0 | LP07 |
| HKAF HKAG HKAH | | | |
| HCIM | CAPFINDER, Crohn's Disease, lib 2 | pCMVSport 2.0 | LP07 |
| HKAL | Keratinocyte, lib 2 | pCMVSport2.0 | LP07 |
| HKAT | Keratinocyte, lib 3 | pCMVSport2.0 | LP07 |
| HNDA | Nasal polyps | pCMVSport2.0 | LP07 |
| HDRA | H. Primary Dendritic Cells, lib 3 | pCMVSport2.0 | LP07 |
| HOHA HOHB HOHC | Human Osteoblasts II | pCMVSport2.0 | LP07 |
| HLDA HLDB HLDC | Liver, Hepatoma | pCMVSport3.0 | LP08 |
| HLDN HLDO HLDP | Human Liver, normal | pCMVSport3.0 | LP08 |
| HMTA | pBMC stimulated w/poly I/C | pCMVSport3.0 | LP08 |
| HNTA | NTERA2, control | pCMVSport3.0 | LP08 |
| HDPA HDPB HDPC HDPD HDPF | Primary Dendritic Cells, lib 1 | pCMVSport3.0 | LP08 |
| HDPG HDPH HDPI HDPJ HDPK | | | |
| HDPM HDPN HDPO HDPP | Primary Dendritic cells,frac 2 | pCMVSport3.0 | LP08 |
| HMUA HMUB HMUC | Myoloid Progenitor Cell Line | pCMVSport3.0 | LP08 |
| HHEA HHEB HHEC HHED | T Cell helper I | pCMVSport3.0 | LP08 |
| HHEM HHEN HHEO HHEP | T cell helper II | pCMVSport3.0 | LP08 |
| HEQA HEQB HEQC | Human endometrial stromal cells | pCMVSport3.0 | LP08 |
| HJMA HJMB | Human endometrial stromal cells- | pCMVSport3.0 | LP08 |
| | treated with progesterone | | |
| HSWA HSWB HSWC | Human endometrial stromal cells- | pCMVSport3.0 | LP08 |
| | treated with estradiol | | |
| HSYA HSYB HSYC | Human Thymus Stromal Cells | pCMVSport3.0 | LP08 |
| HLWA HLWB HLWC | Human Placenta | pCMVSport3.0 | LP08 |
| HRAA HRAB HRAC | Rejected Kidney, lib 4 | pCMVSport3.0 | LP08 |
| HMTM | PCR, pBMC I/C treated | PCRII | LP09 |
| HMJA | H. Meniingima, M6 | pSport 1 | LP10 |
| HMKA HMKB HMKC HMKD | H. Meningima, M1 | pSport 1 | LP10 |
| HMKE | | | |
| HUSG HUSI | Human umbilical vein endothelial cells, | pSport 1 | LP10 |
| | IL-4 induced | | |
| HUSX HUSY | Human Umbilical Vein Endothelial | pSport 1 | LP10 |
| | Cells, uninduced | | |
| HOFA | Ovarian Tumor 1, OV5232 | pSport I | LP10 |
| HCFA HCFB HCFC HCFD | T-Cell PHA 16 hrs | pSport 1 | LP10 |
| HCFL HCFM HCFN HCFO | T-Cell PHA 24 hrs | pSport 1 | LP10 |
| HADA HADC HADD HADE HADF | Human Adipose | pSport 1 | LP10 |
| HADG | | | |
| HOVA HOVB HOVC | Human Ovary | pSport 1 | LP10 |
| HTWB HTWC HTWD HTWE | Resting T-Cell Library, II | pSport 1 | LP10 |
| HTWF | | | |
| HMMA | Spleen metastic melanoma | pSport 1 | LP10 |
| HLYA HLYB HLYC HLYD HLYE | Spleen, Chronic lymphocytic leukemia | pSport 1 | LP10 |
| HCGA | CD34+ cell, I | pSport 1 | LP10 |
| HEOM HEON | Human Eosinophils | pSport 1 | LP10 |
| HTDA | Human Tonsil, Lib 3 | pSport 1 | LP10 |
| HSPA | Salivary Gland, Lib 2 | pSport 1 | LP10 |
| HCHA HCHB HCHC | Breast Cancer cell line, MDA 36 | pSport 1 | LP10 |
| HCHM HCHN | Breast Cancer Cell line, angiogenic | pSport 1 | LP10 |
| HCIA | Crohn's Disease | pSport 1 | LP10 |
| HDAA HDAB HDAC | HEL cell line | pSport 1 | LP10 |
| | Human Astrocyte | pSport 1 | LP10 |
| HUFA HUFB HUFC | Ulcerative Colitis | pSport 1 | LP10 |
| HNTM | NTERA2 + retinoic acid, 14 days | pSport 1 | LP10 |
| HDQA | Primary Dendritic cells, CapFinder2, | pSport 1 | LP10 |
| | frac 1 | | |
| HDQM | Primary Dendritic Cells, CapFinder, | pSport 1 | LP10 |
| | frac 2 | | |
| HLDX | Human Liver, | pSport 1 | LP10 |
| | normal, CapFinder □□□□ | | |
| HULA HULB HULC | Human Dermal Endothelial | pSport1 | LP10 |
| | Cells,untreated | | |
| HUMA | Human Dermal Endothelial cells, treated | pSport1 | LP10 |
| HCJA | Human Stromal Endometrial | pSport1 | LP10 |
| | fibroblasts, untreated | | |
| HCJM | Human Stromal endometrial fibroblasts, | pSport1 | LP10 |
| | treated w/estradiol | | |
| HEDA | Human Stromal endometrial fibroblasts, | pSport1 | LP10 |
| | treated with progesterone | | |
| HFNA | Human ovary tumor cell OV350721 | pSport1 | LP10 |
| HKGA HKGB HKGC HKGD | Merkel Cells | pSport1 | LP10 |
| HISA HISB HISC | Pancreas Islet Cell Tumor | pSport1 | LP10 |
| HLSA | Skin, burned | pSport1 | LP10 |
| HBZA | Prostate, BPH, Lib 2 | pSport 1 | LP10 |
| HBZS | Prostate BPH, Lib 2, subtracted | pSport 1 | LP10 |
| HFIA HFIB HFIC | Synovial Fibroblasts (control) | pSport 1 | LP10 |
| HFIH HFII HFIJ | Synovial hypoxia | pSport 1 | LP10 |
| HFIT HFIU HFIV | Synovial IL-1/TNF stimulated | pSport 1 | LP10 |
| HGCA | Messangial cell, frac 1 | pSport1 | LP10 |
| HMVA HMVB HMVC | Bone Marrow Stromal Cell, untreated | pSport1 | LP10 |
| HFIX HFIY HFIZ | Synovial Fibroblasts (Ill/TNF), subt | pSport1 | LP10 |
| HFOX HFOY HFOZ | Synovial hypoxia-RSF subtracted | pSport1 | LP10 |
| HMQA HMQB HMQC HMQD | Human Activated Monocytes | Uni-ZAP XR | LP11 |
| HLIA HLIB HLIC | Human Liver | pCMVSport 1 | LP012 |
| HHBA HHBB HHBC HHBD HHBE | Human Heart | pCMVSport 1 | LP012 |
| HBBA HBBB | Human Brain | pCMVSport 1 | LP012 |
| HLJA HLJB HLJC HLJD HLJE | Human Lung | pCMVSport 1 | LP012 |
| HOGA HOGB HOGC | Ovarian Tumor | pCMVSport 2.0 | LP012 |
| HTJM | Human Tonsils, Lib 2 | pCMVSport 2.0 | LP012 |
| HAMF HAMG | KMH2 | pCMVSport 3.0 | LP012 |
| HAJA HAJB HAJC | L428 | pCMVSport 3.0 | LP012 |
| HWBA HWBB HWBC HWBD | Dendritic cells, pooled | pCMVSport 3.0 | LP012 |
| HWBE | | | |
| HWAA HWAB HWAC HWAD | Human Bone Marrow, treated | pCMVSport 3.0 | LP012 |
| HWAE | | | |
| HYAA HYAB HYAC | B Cell lymphoma | pCMVSport 3.0 | LP012 |
| HWHG HWHH HWHI | Healing groin wound, 6.5 hours post | pCMVSport 3.0 | LP012 |
| | incision | | |
| HWHP HWHQ HWHR | Healing groin wound; 7.5 hours post | pCMVSport 3.0 | LP012 |
| | incision | | |
| HARM | Healing groin wound - zero hr post- | pCMVSport 3.0 | LP012 |
| | incision (control) | | |
| HBIM | Olfactory epithelium; nasalcavity | pCMVSport 3.0 | LP012 |
| HWDA | Healing Abdomen wound; 70 & 90 min | pCMVSport 3.0 | LP012 |
| | post incision | | |
| HWEA | Healing Abdomen Wound; 15 days post | pCMVSport 3.0 | LP012 |
| | incision | | |
| HWJA | Healing Abdomen Wound; 21 & 29 days | pCMVSport 3.0 | LP012 |
| HNAL | Human Tongue, frac 2 | pSport1 | LP012 |
| HMJA | H. Meniingima, M6 | pSport1 | LP012 |
| HMKA HMKB HMKC HMKD | H. Meningima, M1 | pSport1 | LP012 |
| HMKE | | | |
| HOFA | Ovarian Tumor I, OV5232 | pSport1 | LP012 |
| HCFA HCFB HCFC HCFD | T-Cell PHA 16 hrs | pSport1 | LP012 |
| HCFL HCFM HCFN HCFO | T-Cell PHA 24 hrs | pSport1 | LP012 |
| HMMA HMMB HMMC | Spleen metastic melanoma | pSport1 | LP012 |
| HTDA | Human Tonsil, Lib 3 | pSport1 | LP012 |
| HDBA | Human Fetal Thymus | pSport1 | LP012 |
| HDUA | Pericardium | pSport1 | LP012 |
| HBZA | Prostate, BPH, Lib 2 | pSport1 | LP012 |
| HWCA | Larynx tumor | pSport1 | LP012 |
| HWKA | Normal lung | pSport1 | LP012 |
| HSMB | Bone marrow stroma, treated | pSport1 | LP012 |
| HBHM | Normal trachea | pSport1 | LP012 |
| HLFC | Human Larynx | pSport1 | LP012 |
| HLRB | Siebben Polyposis | pSport1 | LP012 |
| HNIA | Mammary Gland | pSport1 | LP012 |
| HNJB | Palate carcinoma | pSport1 | LP012 |
| HNKA | Palate normal | pSport1 | LP012 |
| HMZA | Pharynx carcinoma | pSport1 | LP012 |
| HABG | Cheek Carcinoma | pSport1 | LP012 |
| HMZM | Pharynx Carcinoma | pSport1 | LP012 |
| HDRM | Larynx Carcinoma | pSport1 | LP012 |
| HVAA | Pancreas normal PCA4 No | pSport1 | LP012 |
| HICA | Tongue carcinoma | pSport1 | LP012 |
| HUKA HUKB HUKC HUKD HUKE | Human Uterine Cancer | Lambda ZAP II | LP013 |
| HFFA | Human Fetal Brain, random primed | Lambda ZAP II | LP013 |
| HTUA | Activated T-cell labeled with 4-thioluri | Lambda ZAP II | LP013 |
| HBQA | Early Stage Human Brain, random | Lambda ZAP II | LP013 |
| | primed | | |
| HMEB | Human microvascular Endothelial cells, | Lambda ZAP II | LP013 |
| | fract. B | | |
| HUSH | Human Umbilical Vein Endothelial | Lambda ZAP II | LP013 |
| | cells, fract. A, re-excision | | |
| HLQC HLQD | Hepatocellular tumor, re-excision | Lambda ZAP II | LP013 |
| HTWJ HTWK HTWL | Resting T-cell, re-excision | Lambda ZAP II | LP013 |
| HF6S | Human Whole 6 week Old Embryo (II), | pBluescript | LP013 |
| | subt | | |
| HHPS | Human Hippocampus, subtracted | pBluescript | LP013 |
| HL1S | LNCAP, differential expression | pBluescript | LP013 |
| HLHS HLHT | Early Stage Human Lung, Subtracted | pBluescript | LP013 |
| HSUS | Supt cells, cyclohexamide treated, | pBluescript | LP013 |
| | subtracted | | |
| HSUT | Supt cells, cyclohexamide treated, | pBluescript | LP013 |
| | differentially expressed | | |
| HSDS | H. Striatum Depression, subtracted | pBluescript | LP013 |
| HPTZ | Human Pituitary, Subtracted VII | pBluescript | LP013 |
| HSDX | H. Striatum Depression, subt II | pBluescript | LP013 |
| HSDZ | H. Striatum Depression, subt | pBluescript | LP013 |
| HPBA HPBB HPBC HPBD HPBE | Human Pineal Gland | pBluescript SK- | LP013 |
| HRTA | Colorectal Tumor | pBluescript SK- | LP013 |
| HSBA HSBB HSBC HSBM | HSC172 cells | pBluescript SK- | LP013 |
| HJAA HJAB HJAC HJAD | Jurkat T-cell G1 phase | pBluescript SK- | LP013 |
| HJBA HJBB HJBC HJBD | Jurkat T-cell, S1 phase | pBluescript SK- | LP013 |
| HTNA HTNB | Human Thyroid | pBluescript SK- | LP013 |
| HAHA HAHB | Human Adult Heart | Uni-ZAP XR | LP013 |
| HE6A | Whole 6 week Old Embryo | Uni-ZAP XR | LP013 |
| HFCA HFCB HFCC HFCD HFCE | Human Fetal Brain | Uni-ZAP XR | LP013 |
| HFKC HFKD HFKE HFKF HFKG | Human Fetal Kidney | Uni-ZAP XR | LP013 |
| HGBA HGBD HGBE HGBF HGBG | Human Gall Bladder | Uni-ZAP XR | LP013 |
| HPRA HPRB HPRC HPRD | Human Prostate | Uni-ZAP XR | LP013 |
| HTEA HTEB HTEC HTED HTEE | Human Testes | Uni-ZAP XR | LP013 |
| HTTA HTTB HTTC HTTD HTTE | Human Testes Tumor | Uni-ZAP XR | LP013 |
| HYBA HYBB | Human Fetal Bone | Uni-ZAP XR | LP013 |
| HFLA | Human Fetal Liver | Uni-ZAP XR | LP013 |
| HHFB HHFC HHFD HHFE HHFF | Human Fetal Heart | Uni-ZAP XR | LP013 |
| HUVB HUVC HUVD HUVE | Human Umbilical Vein, End. remake | Uni-ZAP XR | LP013 |
| HTHB HTHC HTHD | Human Thymus | Uni-ZAP XR | LP013 |
| HSTA HSTB HSTC HSTD | Human Skin Tumor | Uni-ZAP XR | LP013 |
| HTAA HTAB HTAC HTAD HTAE | Human Activated T-cells | Uni-ZAP XR | LP013 |
| HFEA HFEB HFEC | Human Fetal Epithelium (skin) | Uni-ZAP XR | LP013 |
| HJPA HJPB HJPC HJPD | Human Jurkat Membrane Bound | Uni-ZAP XR | LP013 |
| | Polysomes | | |
| HESA | Human Epithelioid Sarcoma | Uni-ZAP XR | LP013 |
| HALS | Human Adult Liver, Subtracted | Uni-ZAP XR | LP013 |
| HFTA HFTB HFTC HFTD | Human Fetal Dura Mater | Uni-ZAP XR | LP013 |
| HCAA HCAB HCAC | Cem cells, cyclohexamide treated | Uni-ZAP XR | LP013 |
| HRGA HRGB HRGC HRGD | Raji Cells, cyclohexamide treated | Uni-ZAP XR | LP013 |
| HE9A HE9B HE9C HE9D HE9E | Nine Week Old Early Stage Human | Uni-ZAP XR | LP013 |
| HSFA | Human Fibrosarcoma | Uni-ZAP XR | LP013 |
| HATA HATB HATC HATD HATE | Human Adrenal Gland Tumor | Uni-ZAP XR | LP013 |
| HTRA | Human Trachea Tumor | Uni-ZAP XR | LP013 |
| HE2A HE2D HE2E HE2H HE2I | 12 Week Old Early Stage Human | Uni-ZAP XR | LP013 |
| HE2B HE2C HE2F HE2G HE2P | 12 Week Old Early Stage Human, II | Uni-ZAP XR | LP013 |
| HNEA HNEB HNEC HNED HNEE | Human Neutrophil | Uni-ZAP XR | LP013 |
| HBGA | Human Primary Breast Cancer | Uni-ZAP XR | LP013 |
| HPTS HPTT HPTU | Human Pituitary, subtracted | Uni-ZAP XR | LP013 |
| HMQA HMQB HMQC HMQD | Human Activated Monocytes | Uni-ZAP XR | LP013 |
| HOAA HOAB HOAC | Human Osteosarcoma | Uni-ZAP XR | LP013 |
| HTOA HTOD HTOE HTOF HTOG | human tonsils | Uni-ZAP XR | LP013 |
| HMGB | Human OB MG63 control fraction I | Uni-ZAP XR | LP013 |
| HOPB | Human OB HOS control fraction I | Uni-ZAP XR | LP013 |
| HOQB | Human OB HOS treated (1 nM E2) | Uni-ZAP XR | LP013 |
| | fraction I | | |
| HAUA HAUB HAUC | Amniotic Cells - TNF induced | Uni-ZAP XR | LP013 |
| HAQA HAQB HAQC HAQD | Amniotic Cells - Primary Culture | Uni-ZAP XR | LP013 |
| HROA HROC | HUMAN STOMACH | Uni-ZAP XR | LP013 |
| HBJA HBJB HBJC HBJD HBJE | HUMAN B CELL LYMPHOMA | Uni-ZAP XR | LP013 |
| HODA HODB HODC HODD | human ovarian cancer | Uni-ZAP XR | LP013 |
| HCPA | Corpus Callosum | Uni-ZAP XR | LP013 |
| HSOA | stomach cancer (human) | Uni-ZAP XR | LP013 |
| HERA | SKIN | Uni-ZAP XR | LP013 |
| HMDA | Brain-medulloblastoma | Uni-ZAP XR | LP013 |
| HGLA HGLB HGLD | Glioblastoma | Uni-ZAP XR | LP013 |
| HWTA HWTB HWTC | wilm's tumor | Uni-ZAP XR | LP013 |
| HEAA | H. Atrophic Endometrium | Uni-ZAP XR | LP013 |
| HAPN HAPO HAPP HAPQ HAPR | Human Adult Pulmonary; re-excision | Uni-ZAP XR | LP013 |
| HLTG HLTH | Human T-cell lymphoma; re-excision | Uni-ZAP XR | LP013 |
| HAHC HAHD HAHE | Human Adult Heart; re-excision | Uni-ZAP XR | LP013 |
| HAGA HAGB HAGC HAGD HAGE | Human Amygdala | Uni-ZAP XR | LP013 |
| HSJA HSJB HSJC | Smooth muscle-ILb induced | Uni-ZAP XR | LP013 |
| HSHA HSHB HSHC | Smooth muscle, IL 1b induced | Uni-ZAP XR | LP013 |
| HPWA HPWB HPWC HPWD | Prostate BPH | Uni-ZAP XR | LP013 |
| HPWE | | | |
| HPIA HPIB HPIC | LNCAP prostate cell line | Uni-ZAP XR | LP013 |
| HPJA HPJB HPJC | PC3 Prostate cell line | Uni-ZAP XR | LP013 |
| HBTA | Bone Marrow Stroma, TNF & LPS ind | Uni-ZAP XR | LP013 |
| HMCF HMCG HMCH HMCI HMCJ | Macrophage-oxLDL; re-excision | Uni-ZAP XR | LP013 |
| HAGG HAGH HAGI | Human Amygdala; re-excision | Uni-ZAP XR | LP013 |
| HACA | H. Adipose Tissue | Uni-ZAP XR | LP013 |
| HKFB | K562 + PMA (36 hrs), re-excision | ZAP Express | LP013 |
| HCWT HCWU HCWV | CD34 positive cells (cord blood), re-ex | ZAP Express | LP013 |
| HBWA | Whole brain | ZAP Express | LP013 |
| HBXA HBXB HBXC HBXD | Human Whole Brain #2- Oligo dT > | ZAP Express | LP013 |
| | 1.5 Kb | | |
| HAVM | Temporal cortex-Alzheizmer | pT-Adv | LP014 |
| HAVT | Hippocampus, Alzheimer Subtracted | pT-Adv | LP014 |
| HHAS | CHME Cell Line | Uni-ZAP XR | LP014 |
| HAJR | Larynx normal | pSport 1 | LP014 |
| HWLE HWLF HWLG HWLH | Colon Normal | pSport 1 | LP014 |
| HCRM HCRN HCRO | Colon Carcinoma | pSport 1 | LP014 |
| HWLI HWLJ HWLK | Colon Normal | pSport 1 | LP014 |
| HWLQ HWLR HWLS HWLT | Colon Tumor | pSport 1 | LP014 |
| HBFM | Gastrocnemius Muscle | pSport 1 | LP014 |
| HBOD HBOE | Quadriceps Muscle | pSport 1 | LP014 |
| HBKD HBKE | Soleus Muscle | pSport 1 | LP014 |
| HCCM | Pancreatic Langerhans | pSport 1 | LP014 |
| HWGA | Larynx carcinoma | pSport 1 | LP014 |
| HWGM HWGN | Larynx carcinoma | pSport 1 | LP014 |
| HWLA HWLB HWLC | Normal colon | pSport 1 | LP014 |
| HWLM HWLN | Colon Tumor | pSport 1 | LP014 |
| HVAM HVAN HVAO | Pancreas Tumor | pSport 1 | LP014 |
| HWGQ | Larynx carcinoma | pSport 1 | LP014 |
| HAQM HAQN | Salivary Gland | pSport 1 | LP014 |
| HASM | Stomach; normal | pSport 1 | LP014 |
| HBCM | Uterus; normal | pSport 1 | LP014 |
| HCDM | Testis; normal | pSport 1 | LP014 |
| HDJM | Brain; normal | pSport 1 | LP014 |
| HEFM | Adrenal Gland, normal | pSport 1 | LP014 |
| HBAA | Rectum normal | pSport 1 | LP014 |
| HFDM | Rectum tumour | pSport 1 | LP014 |
| HGAM | Colon, normal | pSport 1 | LP014 |
| HHMM | Colon, tumour | pSport 1 | LP014 |
| HCLB HCLC | Human Lung Cancer | Lambda Zap II | LP015 |
| HRLA | L1 Cell line | ZAP Express | LP015 |
| HHAM | Hypothalamus, Alzheimer's | pCMVSport 30 | LP015 |
| HKBA | Ku 812F Basophils Line | pSport 1 | LP015 |
| HS2S | Saos2, Dexamethosome Treated | pSport 1 | LP016 |
| HA5A | Lung Carcinoma A549 TNFalpha | pSport 1 | LP016 |
| | activated | | |
| HTFM | IF-1 Cell Line GM-CSF Treated | pSport 1 | LP016 |
| HYAS | Thyroid Tumour | pSport 1 | LP016 |
| HUTS | Larynx Normal | pSport 1 | LP016 |
| HXOA | Larynx Tumor | pSport 1 | LP016 |
| HEAH | Ea.hy.926 cell line | pSport 1 | LP016 |
| HINA | Adenocarcinoma Human | pSport 1 | LP016 |
| HRMA | Lung Mesothelium | pSport 1 | LP016 |
| HLCL | Human Pre-Differentiated Adipocytes | Uni-Zap XR | LP017 |
| HS2A | Saos2 Cells | pSport 1 | LP020 |
| HS2I | Saos2 Cells; Vitamin D3 Treated | pSport 1 | LP020 |
| HUCM | CHME Cell Line, untreated | pSport 1 | LP020 |
| HEPN | Aryepiglottis Normal | pSport 1 | LP020 |
| HPSN | Sinus Piniformis Tumour | pSport 1 | LP020 |
| HNSA | Stomach Normal | pSport 1 | LP020 |
| HNSM | Stomach Tumour | pSport 1 | LP020 |
| HNLA | Liver Normal Met5No | pSport 1 | LP020 |
| HUTA | Liver Tumour Met 5 Tu | pSport 1 | LP020 |
| HOCN | Colon Normal | pSport 1 | LP020 |
| HOCT | Colon Tumor | pSport 1 | LP020 |
| HTNT | Tongue Tumour | pSport 1 | LP020 |
| HLXN | Larynx Normal | pSport 1 | LP020 |
| HLXT | Larynx Tumour | pSport 1 | LP020 |
| HTYN | Thymus | pSport 1 | LP020 |
| HPLN | Placenta | pSport 1 | LP020 |
| HTNG | Tongue Normal | pSport 1 | LP020 |
| HZAA | Thyroid Normal (SDCA2 No) | pSport 1 | LP020 |
| HWES | Thyroid Thyroiditis | pSport 1 | LP020 |
| HFHD | Ficolled Human Stromal Cells, 5Fu | pTrip 1 Ex2 | LP021 |
| | treated | | |
| HFHM, HFHN | Ficolled Human Stromal Cells, | pTrip 1 Ex2 | LP021 |
| | Untreated | | |
| HPCI | Hep G2 Cells, lambda library | lambda Zap-CMV | LP021 |
| | | XR | |
| HBCA, HBCB, HBCC | H. Lymph node breast Cancer | Uni-ZAP XR | LP021 |
| HCOK | Chondrocytes | pSPORT1 | LP022 |
| HDCA, HDCB, HDCC | Dendritic Cells From CD34 Cells | pSPORT1 | LP022 |
| HDMA, HDMB | CD40 activated monocyte dendritic | pSPORT1 | LP022 |
| | cells | | |
| HDDM, HDDN, HDDO | LPS activated derived dendritic cells | pSPORT1 | LP022 |
| HPCR | Hep G2 Cells, PCR library | lambda Zap-CMV | LP022 |
| | | XR | |
| HAAA, HAAB, HAAC | Lung, Cancer (4005313A3): Invasive | pSPORT1 | LP022 |
| | Poorly Differentiated Lung | | |
| | Adenocarcinoma | | |
| HIPA, HIPB, HIPC | Lung, Cancer (4005163 B7): Invasive, | pSPORT1 | LP022 |
| | Poorly Diff. Adenocarcinoma, | | |
| | Metastatic | | |
| HOOH, HOOI | Ovary, Cancer: (4004562 B6) Papillary | pSPORT1 | LP022 |
| | Serous Cystic Neoplasm, Low | | |
| | Malignant Pot | | |
| HIDA | Lung, Normal: (4005313 B1) | pSPORT1 | LP022 |
| HUJA, HUJB, HUJC, HUJD, HUJE | B-Cells | pCMVSport 3.0 | LP022 |
| HNOA, HNOB, HNOC, HNOD | Ovary, Normal: (9805C040R) | pSPORT1 | LP022 |
| HNLM | Lung, Normal: (4005313 B1) | pSPORT1 | LP022 |
| HSCL | Stromal Cells | pSPORT1 | LP022 |
| HAAX | Lung, Cancer: (4005313 A3) Invasive | pSPORT1 | LP022 |
| | Poorly-differentiated Metastatic lung | | |
| | adenocarcinoma | | |
| HUUA, HUUB, HUUC, HUUD | B-cells (unstimulated) | pTrip1Ex2 | LP022 |
| HWWA, HWWB, HWWC, HWWD, H | B-cells (stimulated) | pSPORT1 | LP022 |
| WWE, HWWF, HWWG | | | |
| HCCC | Colon, Cancer: (9808C064R) | pCMVSport 3.0 | LP023 |
| HPDO HPDP HPDQ HPDR HPD | Ovary, Cancer (9809C332): Poorly | pSport 1 | LP023 |
| | differentiated adenocarcinoma | | |
| HPCO HPCP HPCQ HPCT | Ovary, Cancer (15395A1F): Grade II | pSport 1 | LP023 |
| | Papillary Carcinoma | | |
| HOCM HOCO HOCP HOCQ | Ovary, Cancer: (15799A1F) Poorly | pSport 1 | LP023 |
| | differentiated carcinoma | | |
| HCBM HCBN HCBO | Breast, Cancer: (4004943 A5) | pSport 1 | LP023 |
| HNBT HNBU HNBV | Breast, Normal: (4005522B2) | pSport 1 | LP023 |
| HBCP HBCQ | Breast, Cancer: (4005522 A2) | pSport 1 | LP023 |
| HBCJ | Breast, Cancer: (9806C012R) | pSport 1 | LP023 |
| HSAM HSAN | Stromal cells 3.88 | pSport 1 | LP023 |
| HVCA HVCB HVCC HVCD | Ovary, Cancer: (4004332 A2) | pSport 1 | LP023 |
| HSCK HSEN HSEO | Stromal cells (HBM3.18) | pSport 1 | LP023 |
| HSCP HSCQ | stromal cell clone 2.5 | pSport 1 | LP023 |
| HUXA | Breast Cancer: (4005385 A2) | pSport 1 | LP023 |
| HCOM HCON HCOO HCOP HCOQ | Ovary, Cancer (4004650 A3): Well- | pSport 1 | LP023 |
| | Differentiated Micropapillary Serous | | |
| | Carcinoma | | |
| HBNM | Breast, Cancer: (9802C020E) | pSport 1 | LP023 |
| HVVA HVVB HVVC HVVD HVVE | Human Bone Marrow, treated | pSport 1 | LP023 |

[0922] Two nonlimiting examples are provided below for isolating a particular clone from the deposited sample of plasmid cDNAs cited for that clone in Table 7. First, a plasmid is directly isolated by screening the clones using a polynucleotide probe corresponding to the nucleotide sequence of SEQ ID NO:X.

[0923] Particularly, a specific polynucleotide with 30-40 nucleotides is synthesized using an Applied Biosystems DNA synthesizer according to the sequence reported. The oligonucleotide is labeled, for instance, with ³²P-γ-ATP using T4 polynucleotide kinase and purified according to routine methods. (E.g., Maniatis et al., Molecular Cloning: A Laboratory Manual, Cold Spring Harbor Press, Cold Spring, N.Y. (1982).) The plasmid mixture is transformed into a suitable host, as indicated above (such as XL-1 Blue (Stratagene)) using techniques known to those of skill in the art, such as those provided by the vector supplier or in related publications or patents cited above. The transformants are plated on 1.5% agar plates (containing the appropriate selection agent, e.g., ampicillin) to a density of about 150 transformants (colonies) per plate. These plates are screened using Nylon membranes according to routine methods for bacterial colony screening (e.g., Sambrook et al., Molecular Cloning: A Laboratory Manual, 2nd Edit., (1989), Cold Spring Harbor Laboratory Press, pages 1.93 to 1.104), or other techniques known to those of skill in the art.

[0924] Alternatively, two primers of 17-20 nucleotides derived from both ends of the nucleotide sequence of SEQ ID NO:X are synthesized and used to amplify the desired cDNA using the deposited cDNA plasmid as a template. The polymerase chain reaction is carried out under routine conditions, for instance, in 25 μl of reaction mixture with 0.5 ug of the above cDNA template. A convenient reaction mixture is 1.5-5 mM MgCl₂, 0.01% (w/v) gelatin, 20 μM each of dATP, dCTP, dGTP, dTTP, 25 pmol of each primer and 0.25 Unit of Taq polymerase. Thirty five cycles of PCR (denaturation at 94° C. for 1 min; annealing at 55° C. for 1 min; elongation at 72° C. for 1 min) are performed with a Perkin-Elmer Cetus automated thermal cycler. The amplified product is analyzed by agarose gel electrophoresis and the DNA band with expected molecular weight is excised and purified. The PCR product is verified to be the selected sequence by subcloning and sequencing the DNA product.

[0925] Several methods are available for the identification of the 5′ or 3′ non-coding portions of a gene which may not be present in the deposited clone. These methods include but are not limited to, filter probing, clone enrichment using specific probes, and protocols similar or identical to 5′ and 3′ “RACE” protocols which are well known in the art. For instance, a method similar to 5′ RACE is available for generating the missing 5′ end of a desired full-length transcript. (Fromont-Racine et al., Nucleic Acids Res. 21(7):1683-1684 (1993).)

[0926] Briefly, a specific RNA oligonucleotide is ligated to the 5′ ends of a population of RNA presumably containing full-length gene RNA transcripts. A primer set containing a primer specific to the ligated RNA oligonucleotide and a primer specific to a known sequence of the gene of interest is used to PCR amplify the 5′ portion of the desired full-length gene. This amplified product may then be sequenced and used to generate the full length gene.

[0927] This above method starts with total RNA isolated from the desired source, although poly-A+ RNA can be used. The RNA preparation can then be treated with phosphatase if necessary to eliminate 5′ phosphate groups on degraded or damaged RNA which may interfere with the later RNA ligase step. The phosphatase should then be inactivated and the RNA treated with tobacco acid pyrophosphatase in order to remove the cap structure present at the 5′ ends of messenger RNAs. This reaction leaves a 5′ phosphate group at the 5′ end of the cap cleaved RNA which can then be ligated to an RNA oligonucleotide using T4 RNA ligase.

[0928] This modified RNA preparation is used as a template for first strand cDNA synthesis using a gene specific oligonucleotide. The first strand synthesis reaction is used as a template for PCR amplification of the desired 5′ end using a primer specific to the ligated RNA oligonucleotide and a primer specific to the known sequence of the gene of interest. The resultant product is then sequenced and analyzed to confirm that the 5′ end sequence belongs to the desired gene.

### Example 2

### Isolation of Genomic Clones Corresponding to a Polynucleotide

[0929] A human genomic P1 library (Genomic Systems, Inc.) is screened by PCR using primers selected for the sequence corresponding to SEQ ID NO:X according to the method described in Example 1. (See also, Sambrook et al., Molecular Cloning: A Laboratory Manual, 2nd Edn., (1989), Cold Spring Harbor Laboratory Press).

### Example 3

### Tissue Specific Expression Analysis

[0930] The Human Genome Sciences, Inc. (HGS) database is derived from sequencing tissue and/or disease specific cDNA libraries. Libraries generated from a particular tissue are selected and the specific tissue expression pattern of EST groups or assembled contigs within these libraries is determined by comparison of the expression patterns of those groups or contigs within the entire database. ESTs and assembled contigs which show tissue specific expression are selected.

[0931] The original clone from which the specific EST sequence was generated, or in the case of an assembled contig, the clone from which the 5′ most EST sequence was generated, is obtained from the catalogued library of clones and the insert amplified by PCR using methods known in the art. The PCR product is denatured and then transferred in 96 or 384 well format to a nylon membrane (Schleicher and Scheull) generating an array filter of tissue specific clones. Housekeeping genes, maize genes, and known tissue specific genes are included on the filters. These targets can be used in signal normalization and to validate assay sensitivity. Additional targets are included to monitor probe length and specificity of hybridization.

[0932] Radioactively labeled hybridization probes are generated by first strand cDNA synthesis per the manufacturer's instructions (Life Technologies) from mRNA/RNA samples prepared from the specific tissue being analyzed (e.g., lung, lung cancer, prostate, prostate cancer, ovarian, ovarian cancer, etc.). The hybridization probes are purified by gel exclusion chromatography, quantitated, and hybridized with the array filters in hybridization bottles at 65° C. overnight. The filters are washed under stringent conditions and signals are captured using a Fuji phosphorimager.

[0933] Data is extracted using AIS software and following background subtraction, signal normalization is performed. This includes a normalization of filter-wide expression levels between different experimental runs. Genes that are differentially expressed in the tissue of interest are identified.

### Example 4

### Chromosomal Mapping of the Polynucleotides

[0934] An oligonucleotide primer set is designed according to the sequence at the 5′ end of SEQ ID NO:X. This primer preferably spans about 100 nucleotides. This primer set is then used in a polymerase chain reaction under the following set of conditions: 30 seconds, 95° C.; 1 minute, 56° C.; 1 minute, 70° C. This cycle is repeated 32 times followed by one 5 minute cycle at 70° C. Human, mouse, and hamster DNA is used as template in addition to a somatic cell hybrid panel containing individual chromosomes or chromosome fragments (Bios, Inc). The reactions are analyzed on either 8% polyacrylamide gels or 3.5% agarose gels. Chromosome mapping is determined by the presence of an approximately 100 bp PCR fragment in the particular somatic cell hybrid.

### Example 5

### Bacterial Expression of a Polypeptide

[0935] A polynucleotide encoding a polypeptide of the present invention is amplified using PCR oligonucleotide primers corresponding to the 5′ and 3′ ends of the DNA sequence, as outlined in Example 1, to synthesize insertion fragments. The primers used to amplify the cDNA insert should preferably contain restriction sites, such as BamHI and XbaI, at the 5′ end of the primers in order to clone the amplified product into the expression vector. For example, BamHI and XbaI correspond to the restriction enzyme sites on the bacterial expression vector pQE-9. (Qiagen, Inc., Chatsworth, Calif.). This plasmid vector encodes antibiotic resistance (Amp^{r}), a bacterial origin of replication (ori), an IPTG-regulatable promoter/operator (P/O), a ribosome binding site (RBS), a 6-histidine tag (6-His), and restriction enzyme cloning sites.

[0936] The pQE-9 vector is digested with BamHI and XbaI and the amplified fragment is ligated into the pQE-9 vector maintaining the reading frame initiated at the bacterial RBS. The ligation mixture is then used to transform the E. coli strain M15/rep4 (Qiagen, Inc.) which contains multiple copies of the plasmid pREP4, which expresses the lacI repressor and also confers kanamycin resistance (Kan^{r}). Transformants are identified by their ability to grow on LB plates and ampicillin/kanamycin resistant colonies are selected. Plasmid DNA is isolated and confirmed by restriction analysis.

[0937] Clones containing the desired constructs are grown overnight (O/N) in liquid culture in LB media supplemented with both Amp (100 ug/ml) and Kan (25 ug/ml). The O/N culture is used to inoculate a large culture at a ratio of 1:100 to 1:250. The cells are grown to an optical density 600 (O.D.⁶⁰⁰) of between 0.4 and 0.6. IPTG (Isopropyl-B-D-thiogalacto pyranoside) is then added to a final concentration of 1 mM. IPTG induces by inactivating the lacI repressor, clearing the P/O leading to increased gene expression.

[0938] Cells are grown for an extra 3 to 4 hours. Cells are then harvested by centrifugation (20 mins at 6000×g). The cell pellet is solubilized in the chaotropic agent 6 Molar Guanidine HCl by stirring for 3-4 hours at 4° C. The cell debris is removed by centrifugation, and the supernatant containing the polypeptide is loaded onto a nickel-nitrilo-tri-acetic acid (“Ni-NTA”) affinity resin column (available from QIAGEN, Inc., supra). Proteins with a 6×His tag bind to the Ni-NTA resin with high affinity and can be purified in a simple one-step procedure (for details see: The QIAexpressionist (1995) QIAGEN, Inc., supra).

[0939] Briefly, the supernatant is loaded onto the column in 6 M guanidine-HCl, pH 8. The column is first washed with 10 volumes of 6 M guanidine-HCl, pH 8, then washed with 10 volumes of 6 M guanidine-HCl pH 6, and finally the polypeptide is eluted with 6 M guanidine-HCl, pH 5.

[0940] The purified protein is then renatured by dialyzing it against phosphate-buffered saline (PBS) or 50 mM Na-acetate, pH 6 buffer plus 200 mM NaCl. Alternatively, the protein can be successfully refolded while immobilized on the Ni-NTA column. The recommended conditions are as follows: renature using a linear 6M-1M urea gradient in 500 mM NaCl, 20% glycerol, 20 mM Tris/HCl pH 7.4, containing protease inhibitors. The renaturation should be performed over a period of 1.5 hours or more. After renaturation the proteins are eluted by the addition of 250 mM immidazole. Immidazole is removed by a final dialyzing step against PBS or 50 mM sodium acetate pH 6 buffer plus 200 mM NaCl. The purified protein is stored at 4° C. or frozen at −80° C.

[0941] In addition to the above expression vector, the present invention further includes an expression vector, called pHE4a (ATCC Accession Number 209645, deposited on Feb. 25, 1998) which contains phage operator and promoter elements operatively linked to a polynucleotide of the present invention. This vector contains: 1) a neomycinphosphotransferase gene as a selection marker, 2) an E. coli origin of replication, 3) a T5 phage promoter sequence, 4) two lac operator sequences, 5) a Shine-Delgarno sequence, and 6) the lactose operon repressor gene (lacIq). The origin of replication (oriC) is derived from pUC19 (LTI, Gaithersburg, Md.). The promoter and operator sequences are made synthetically.

[0942] DNA can be inserted into the pHE4a by restricting the vector with NdeI and XbaI, BamHI, XhoI, or Asp718, running the restricted product on a gel, and isolating the larger fragment (the stuffer fragment should be about 310 base pairs). The DNA insert is generated according to the PCR protocol described in Example 1, using PCR primers having restriction sites for NdeI (5′ primer) and XbaI, BamHI, XhoI, or Asp718 (3′ primer). The PCR insert is gel purified and restricted with compatible enzymes. The insert and vector are ligated according to standard protocols.

[0943] The engineered vector could easily be substituted in the above protocol to express protein in a bacterial system.

### Example 6

### Purification of a Polypeptide from an Inclusion Body

[0944] The following alternative method can be used to purify a polypeptide expressed in E coli when it is present in the form of inclusion bodies. Unless otherwise specified, all of the following steps are conducted at 4-10° C.

[0945] Upon completion of the production phase of the E. coli fermentation, the cell culture is cooled to 4-10° C. and the cells harvested by continuous centrifugation at 15,000 rpm (Heraeus Sepatech). On the basis of the expected yield of protein per unit weight of cell paste and the amount of purified protein required, an appropriate amount of cell paste, by weight, is suspended in a buffer solution containing 100 mM Tris, 50 mM EDTA, pH 7.4. The cells are dispersed to a homogeneous suspension using a high shear mixer.

[0946] The cells are then lysed by passing the solution through a microfluidizer (Microfuidics, Corp. or APV Gaulin, Inc.) twice at 4000-6000 psi. The homogenate is then mixed with NaCl solution to a final concentration of 0.5 M NaCl, followed by centrifugation at 7000×g for 15 min. The resultant pellet is washed again using 0.5M NaCl, 100 mM Tris, 50 mM EDTA, pH 7.4.

[0947] The resulting washed inclusion bodies are solubilized with 1.5 M guanidine hydrochloride (GuHCl) for 2-4 hours. After 7000×g centrifugation for 15 min., the pellet is discarded and the polypeptide containing supernatant is incubated at 4° C. overnight to allow further GuHCl extraction.

[0948] Following high speed centrifugation (30,000×g) to remove insoluble particles, the GuHCl solubilized protein is refolded by quickly mixing the GuHCl extract with 20 volumes of buffer containing 50 mM sodium, pH 4.5, 150 mM NaCl, 2 mM EDTA by vigorous stirring. The refolded diluted protein solution is kept at 4° C. without mixing for 12 hours prior to further purification steps.

[0949] To clarify the refolded polypeptide solution, a previously prepared tangential filtration unit equipped with 0.16 μm membrane filter with appropriate surface area (e.g., Filtron), equilibrated with 40 mM sodium acetate, pH 6.0 is employed. The filtered sample is loaded onto a cation exchange resin (e.g., Poros HS-50, Perseptive Biosystems). The column is washed with 40 mM sodium acetate, pH 6.0 and eluted with 250 mM, 500 mM, 1000 mM, and 1500 mM NaCl in the same buffer, in a stepwise manner. The absorbance at 280 nm of the effluent is continuously monitored. Fractions are collected and further analyzed by SDS-PAGE.

[0950] Fractions containing the polypeptide are then pooled and mixed with 4 volumes of water. The diluted sample is then loaded onto a previously prepared set of tandem columns of strong anion (Poros HQ-50, Perseptive Biosystems) and weak anion (Poros CM-20, Perseptive Biosystems) exchange resins. The columns are equilibrated with 40 mM sodium acetate, pH 6.0. Both columns are washed with 40 mM sodium acetate, pH 6.0, 200 mM NaCl. The CM-20 column is then eluted using a 10 column volume linear gradient ranging from 0.2 M NaCl, 50 mM sodium acetate, pH 6.0 to 1.0 M NaCl, 50 mM sodium acetate, pH 6.5. Fractions are collected under constant A₂₈₀ monitoring of the effluent. Fractions containing the polypeptide (determined, for instance, by 16% SDS-PAGE) are then pooled.

[0951] The resultant polypeptide should exhibit greater than 95% purity after the above refolding and purification steps. No major contaminant bands should be observed from Commassie blue stained 16% SDS-PAGE gel when 5 μg of purified protein is loaded. The purified protein can also be tested for endotoxin/LPS contamination, and typically the LPS content is less than 0.1 ng/ml according to LAL assays.

### Example 7

### Cloning and Expression of a Polypeptide in a Baculovirus Expression System

[0952] In this example, the plasmid shuttle vector pA2 is used to insert a polynucleotide into a baculovirus to express a polypeptide. This expression vector contains the strong polyhedrin promoter of the Autographa californica nuclear polyhedrosis virus (AcMNPV) followed by convenient restriction sites such as BamHI, Xba I and Asp718. The polyadenylation site of the simian virus 40 (“SV40”) is used for efficient polyadenylation. For easy selection of recombinant virus, the plasmid contains the beta-galactosidase gene from E. coli under control of a weak Drosophila promoter in the same orientation, followed by the polyadenylation signal of the polyhedrin gene. The inserted genes are flanked on both sides by viral sequences for cell-mediated homologous recombination with wild-type viral DNA to generate a viable virus that express the cloned polynucleotide.

[0953] Many other baculovirus vectors can be used in place of the vector above, such as pAc373, pVL941, and pAcIM1, as one skilled in the art would readily appreciate, as long as the construct provides appropriately located signals for transcription, translation, secretion and the like, including a signal peptide and an in-frame AUG as required. Such vectors are described, for instance, in Luckow et al., Virology 170:31-39 (1989).

[0954] Specifically, the cDNA sequence contained in the deposited clone, including the AUG initiation codon, is amplified using the PCR protocol described in Example 1. If a naturally occurring signal sequence is used to produce the polypeptide of the present invention, the pA2 vector does not need a second signal peptide. Alternatively, the vector can be modified (pA2 GP) to include a baculovirus leader sequence, using the standard methods described in Summers et al., “A Manual of Methods for Baculovirus Vectors and Insect Cell Culture Procedures,” Texas Agricultural Experimental Station Bulletin No. 1555 (1987).

[0955] The amplified fragment is isolated from a 1% agarose gel using a commercially available kit (“Geneclean,” BIO 101 Inc., La Jolla, Calif.). The fragment then is digested with appropriate restriction enzymes and again purified on a 1% agarose gel.

[0956] The plasmid is digested with the corresponding restriction enzymes and optionally, can be dephosphorylated using calf intestinal phosphatase, using routine procedures known in the art. The DNA is then isolated from a 1% agarose gel using a commercially available kit (“Geneclean” BIO 101 Inc., La Jolla, Calif.).

[0957] The fragment and the dephosphorylated plasmid are ligated together with T4 DNA ligase. E. coli HB101 or other suitable E. coli hosts such as XL-1 Blue (Stratagene Cloning Systems, La Jolla, Calif.) cells are transformed with the ligation mixture and spread on culture plates. Bacteria containing the plasmid are identified by digesting DNA from individual colonies and analyzing the digestion product by gel electrophoresis. The sequence of the cloned fragment is confirmed by DNA sequencing.

[0958] Five μg of a plasmid containing the polynucleotide is co-transfected with 1.0 μg of a commercially available linearized baculovirus DNA (“BaculoGold™ baculovirus DNA”, Pharmingen, San Diego, Calif.), using the lipofection method described by Felgner et al., Proc. Natl. Acad. Sci. USA 84:7413-7417 (1987). One μg of BaculoGold™ virus DNA and 50 μg of the plasmid are mixed in a sterile well of a microtiter plate containing 50 μl of serum-free Grace's medium (Life Technologies Inc., Gaithersburg, Md.). Afterwards, 10 μl Lipofectin plus 90 μl Grace's medium are added, mixed and incubated for 15 minutes at room temperature. Then the transfection mixture is added drop-wise to Sf9 insect cells (ATCC CRL 1711) seeded in a 35 mm tissue culture plate with 1 ml Grace's medium without serum. The plate is then incubated for 5 hours at 27° C. The transfection solution is then removed from the plate and 1 ml of Grace's insect medium supplemented with 10% fetal calf serum is added. Cultivation is then continued at 27° C. for four days.

[0959] After four days the supernatant is collected and a plaque assay is performed, as described by Summers and Smith, supra. An agarose gel with “Blue Gal” (Life Technologies Inc., Gaithersburg) is used to allow easy identification and isolation of gal-expressing clones, which produce blue-stained plaques. (A detailed description of a “plaque assay” of this type can also be found in the user's guide for insect cell culture and baculovirology distributed by Life Technologies Inc., Gaithersburg, page 9-10.) After appropriate incubation, blue stained plaques are picked with the tip of a micropipettor (e.g., Eppendorf). The agar containing the recombinant viruses is then resuspended in a microcentrifuge tube containing 200 μl of Grace's medium and the suspension containing the recombinant baculovirus is used to infect Sf9 cells seeded in 35 mm dishes. Four days later the supernatants of these culture dishes are harvested and then they are stored at 4° C.

[0960] To verify the expression of the polypeptide, Sf9 cells are grown in Grace's medium supplemented with 10% heat-inactivated FBS. The cells are infected with the recombinant baculovirus containing the polynucleotide at a multiplicity of infection (“MOI”) of about 2. If radiolabeled proteins are desired, 6 hours later the medium is removed and is replaced with SF900 II medium minus methionine and cysteine (available from Life Technologies Inc., Rockville, Md.). After 42 hours, 5 μCi of ³⁵S-methionine and 5 μCi ³⁵S-cysteine (available from Amersham) are added. The cells are further incubated for 16 hours and then are harvested by centrifugation. The proteins in the supernatant as well as the intracellular proteins are analyzed by SDS-PAGE followed by autoradiography (if radiolabeled).

[0961] Microsequencing of the amino acid sequence of the amino terminus of purified protein may be used to determine the amino terminal sequence of the produced protein.

### Example 8

### Expression of a Polypeptide in Mammalian Cells

[0962] The polypeptide of the present invention can be expressed in a mammalian cell. A typical mammalian expression vector contains a promoter element, which mediates the initiation of transcription of mRNA, a protein coding sequence, and signals required for the termination of transcription and polyadenylation of the transcript. Additional elements include enhancers, Kozak sequences and intervening sequences flanked by donor and acceptor sites for RNA splicing. Highly efficient transcription is achieved with the early and late promoters from SV40, the long terminal repeats (LTRs) from Retroviruses, e.g., RSV, HTLVI, HIVI and the early promoter of the cytomegalovirus (CMV). However, cellular elements can also be used (e.g., the human actin promoter).

[0963] Suitable expression vectors for use in practicing the present invention include, for example, vectors such as pSVL and pMSG (Pharmacia, Uppsala, Sweden), pRSVcat (ATCC 37152), pSV2dhfr (ATCC 37146), pBC12MI (ATCC 67109), pCMVSport 2.0, and pCMVSport 3.0. Mammalian host cells that could be used include, human Hela, 293, H9 and Jurkat cells, mouse NIH3T3 and C127 cells, Cos 1, Cos 7 and CV1, quail QC1-3 cells, mouse L cells and Chinese hamster ovary (CHO) cells.

[0964] Alternatively, the polypeptide can be expressed in stable cell lines containing the polynucleotide integrated into a chromosome. The co-transfection with a selectable marker such as DHFR, gpt, neomycin, or hygromycin allows the identification and isolation of the transfected cells.

[0965] The transfected gene can also be amplified to express large amounts of the encoded protein. The DHFR (dihydrofolate reductase) marker is useful in developing cell lines that carry several hundred or even several thousand copies of the gene of interest. (See, e.g., Alt, F. W., et al., J. Biol. Chem. 253:1357-1370 (1978); Hamlin, J. L. and Ma, C., Biochem. et Biophys. Acta, 1097:107-143 (1990); Page, M. J. and Sydenham, M. A., Biotechnology 9:64-68 (1991).) Another useful selection marker is the enzyme glutamine synthase (GS) (Murphy et al., Biochem J. 227:277-279 (1991); Bebbington et al., Bio/Technology 10:169-175 (1992). Using these markers, the mammalian cells are grown in selective medium and the cells with the highest resistance are selected. These cell lines contain the amplified gene(s) integrated into a chromosome. Chinese hamster ovary (CHO) and NSO cells are often used for the production of proteins.

[0966] Derivatives of the plasmid pSV2-dhfr (ATCC Accession No. 37146), the expression vectors pC4 (ATCC Accession No. 209646) and pC6 (ATCC Accession No. 209647) contain the strong promoter (LTR) of the Rous Sarcoma Virus (Cullen et al., Molecular and Cellular Biology, 438-447 (March, 1985)) plus a fragment of the CMV-enhancer (Boshart et al., Cell 41:521-530 (1985).) Multiple cloning sites, e.g., with the restriction enzyme cleavage sites BamHI, XbaI and Asp718, facilitate the cloning of the gene of interest. The vectors also contain the 3′ intron, the polyadenylation and termination signal of the rat preproinsulin gene, and the mouse DHFR gene under control of the SV40 early promoter.

[0967] Specifically, the plasmid pC6, for example, is digested with appropriate restriction enzymes and then dephosphorylated using calf intestinal phosphates by procedures known in the art. The vector is then isolated from a 1% agarose gel.

[0968] A polynucleotide of the present invention is amplified according to the protocol outlined in Example 1. If a naturally occurring signal sequence is used to produce the polypeptide of the present invention, the vector does not need a second signal peptide. Alternatively, if a naturally occurring signal sequence is not used, the vector can be modified to include a heterologous signal sequence. (See, e.g., International Publication No. WO 96/34891.)

[0969] The amplified fragment is isolated from a 1% agarose gel using a commercially available kit (“Geneclean,” BIO 101 Inc., La Jolla, Calif.). The fragment then is digested with appropriate restriction enzymes and again purified on a 1% agarose gel.

[0970] The amplified fragment is then digested with the same restriction enzyme and purified on a 1% agarose gel. The isolated fragment and the dephosphorylated vector are then ligated with T4 DNA ligase. E. coli HB101 or XL-1 Blue cells are then transformed and bacteria are identified that contain the fragment inserted into plasmid pC6 using, for instance, restriction enzyme analysis.

[0971] Chinese hamster ovary cells lacking an active DHFR gene is used for transfection. Five flg of the expression plasmid pC6 or pC4 is cotransfected with 0.5 μg of the plasmid pSVneo using lipofectin (Felgner et al., supra). The plasmid pSV2-neo contains a dominant selectable marker, the neo gene from Tn5 encoding an enzyme that confers resistance to a group of antibiotics including G418. The cells are seeded in alpha minus MEM supplemented with 1 mg/ml G418. After 2 days, the cells are trypsinized and seeded in hybridoma cloning plates (Greiner, Germany) in alpha minus MEM supplemented with 10, 25, or 50 ng/ml of methotrexate plus 1 mg/ml G418. After about 10-14 days single clones are trypsinized and then seeded in 6-well petri dishes or 10 ml flasks using different concentrations of methotrexate (50 nM, 100 nM, 200 nM, 400 nM, 800 nM). Clones growing at the highest concentrations of methotrexate are then transferred to new 6-well plates containing even higher concentrations of methotrexate (1 μM, 2 μM, 5 μM, 10 mM, 20 mM). The same procedure is repeated until clones are obtained which grow at a concentration of 100-200 μM. Expression of the desired gene product is analyzed, for instance, by SDS-PAGE and Western blot or by reversed phase HPLC analysis.

### Example 9

### Protein Fusions

[0972] The polypeptides of the present invention are preferably fused to other proteins. These fusion proteins can be used for a variety of applications. For example, fusion of the present polypeptides to His-tag, HA-tag, protein A, IgG domains, and maltose binding protein facilitates purification. (See Example 5; see also EP A 394,827; Traunecker, et al., Nature 331:84-86 (1988).) Similarly, fusion to IgG-1, IgG-3, and albumin increases the halflife time in vivo. Nuclear localization signals fused to the polypeptides of the present invention can target the protein to a specific subcellular localization, while covalent heterodimer or homodimers can increase or decrease the activity of a fusion protein. Fusion proteins can also create chimeric molecules having more than one function. Finally, fusion proteins can increase solubility and/or stability of the fused protein compared to the non-fused protein. All of the types of fusion proteins described above can be made by modifying the following protocol, which outlines the fusion of a polypeptide to an IgG molecule, or the protocol described in Example 5.

[0973] Briefly, the human Fc portion of the IgG molecule can be PCR amplified, using primers that span the 5′ and 3′ ends of the sequence described below. These primers also should have convenient restriction enzyme sites that will facilitate cloning into an expression vector, preferably a mammalian expression vector.

[0974] For example, if pC4 (ATCC Accession No. 209646) is used, the human Fc portion can be ligated into the BamHI cloning site. Note that the 3′ BamHI site should be destroyed. Next, the vector containing the human Fc portion is re-restricted with BamHI, linearizing the vector, and a polynucleotide of the present invention, isolated by the PCR protocol described in Example 1, is ligated into this BamHI site. Note that the polynucleotide is cloned without a stop codon, otherwise a fusion protein will not be produced.

[0975] If the naturally occurring signal sequence is used to produce the polypeptide of the present invention, pC4 does not need a second signal peptide. Alternatively, if the naturally occurring signal sequence is not used, the vector can be modified to include a heterologous signal sequence. (See, e.g., International Publication No. WO 96/34891.)

| | |
|---|---|
| Human IgG Fe region: | |
| GGGATCCGGAGCCCAAATCTTCTGACAAAACTCACACATGCCCACCGT | (SEQ ID NO: 1) |
| GCCCAGCACCTGAATTCGAGGGTGCACCGTCAGTCTTCCTCTTCCCCCC | |
| AAAACCCAAGGACACCCTCATGATCTCCCGGACTCCTGAGGTCACATG | |
| CGTGGTGGTGGACGTAAGCCACGAAGACCCTGAGGTCAAGTTCAACTG | |
| GTACGTGGACGGCGTGGAGGTGCATAATGCCAAGACAAAGCCGCGGG | |
| AGGAGCAGTACAACAGCACGTACCGTGTGGTCAGCGTCCTCACCGTCC | |
| TGCACCAGGACTGGCTGAATGGCAAGGAGTACAAGTGCAAGGTCTCCA | |
| ACAAAGCCCTCCCAACCCCCATCGAGAAAACCATCTCCAAAGCCAAAG | |
| GGCAGCCCCGAGAACCACAGGTGTACACCCTGCCCCCATCCCGGGATG | |
| AGCTGACCAAGAACCAGGTCAGCCTGACCTGCCTGGTCAAAGGCTTCT | |
| ATCCAAGCGACATCGCCGTGGAGTGGGAGAGCAATGGGCAGCCGGAG | |
| AACAACTACAAGACCACGCCTCCCGTGCTGGACTCCGACGGCTCCTTCT | |
| TCCTCTACAGCAAGCTCACCGTGGACAAGAGCAGGTGGCAGCAGGGGA | |
| ACGTCTTCTCATGCTCCGTGATGCATGAGGCTCTGCACAACCACTACAC | |
| GCAGAAGAGCCTCTCCCTGTCTCCGGGTAAATGAGTGCGACGGCCGCG | |
| ACTCTAGAGGAT | |

### Example 10

### Production of an Antibody from a Polypeptide

[0976] Hybridoma Technology

[0977] The antibodies of the present invention can be prepared by a variety of methods. (See, Current Protocols, Chapter 2.) As one example of such methods, cells expressing polypeptide of the present invention are administered to an animal to induce the production of sera containing polyclonal antibodies. In a preferred method, a preparation of polypeptide of the present invention is prepared and purified to render it substantially free of natural contaminants. Such a preparation is then introduced into an animal in order to produce polyclonal antisera of greater specific activity.

[0978] Monoclonal antibodies specific for polypeptide of the present invention are prepared using hybridoma technology (Kohler et al., Nature 256:495 (1975); Kohler et al., Eur. J. Immunol. 6:511 (1976); Kohler et al., Eur. J. Immunol. 6:292 (1976); Hammerling et al., in: Monoclonal Antibodies and T-Cell Hybridomas, Elsevier, N.Y., pp. 563-681 (1981)). In general, an animal (preferably a mouse) is immunized with polypeptide of the present invention or, more preferably, with a secreted polypeptide of the present invention-expressing cell. Such polypeptide-expressing cells are cultured in any suitable tissue culture medium, preferably in Earle's modified Eagle's medium supplemented with 10% fetal bovine serum (inactivated at about 56° C.), and supplemented with about 10 g/l of nonessential amino acids, about 1,000 U/ml of penicillin, and about 100 μg/ml of streptomycin.

[0979] The splenocytes of such mice are extracted and fused with a suitable myeloma cell line. Any suitable myeloma cell line may be employed in accordance with the present invention; however, it is preferable to employ the parent myeloma cell line (SP2O), available from the ATCC. After fusion, the resulting hybridoma cells are selectively maintained in HAT medium, and then cloned by limiting dilution as described by Wands et al. (Gastroenterology 80:225-232 (1981)). The hybridoma cells obtained through such a selection are then assayed to identify clones which secrete antibodies capable of binding the polypeptide of the present invention.

[0980] Alternatively, additional antibodies capable of binding to polypeptide of the present invention can be produced in a two-step procedure using anti-idiotypic antibodies. Such a method makes use of the fact that antibodies are themselves antigens, and therefore, it is possible to obtain an antibody which binds to a second antibody. In accordance with this method, protein specific antibodies are used to immunize an animal, preferably a mouse. The splenocytes of such an animal are then used to produce hybridoma cells, and the hybridoma cells are screened to identify clones which produce an antibody whose ability to bind to the polypeptide of the present invention-specific antibody can be blocked by polypeptide of the present invention. Such antibodies comprise anti-idiotypic antibodies to the polypeptide of the present invention-specific antibody and are used to immunize an animal to induce formation of further polypeptide of the present invention-specific antibodies.

[0981] For in vivo use of antibodies in humans, an antibody is “humanized”. Such antibodies can be produced using genetic constructs derived from hybridoma cells producing the monoclonal antibodies described above. Methods for producing chimeric and humanized antibodies are known in the art and are discussed herein. (See, for review, Morrison, Science 229:1202 (1985); Oi et al., BioTechniques 4:214 (1986); Cabilly et al., U.S. Pat. No. 4,816,567; Taniguchi et al., EP 171496; Morrison et al., EP 173494; Neuberger et al., WO 8601533; Robinson et al., International Publication No. WO 8702671; Boulianne et al., Nature 312:643 (1984); Neuberger et al., Nature 314:268 (1985).)

[0982] Isolation of Antibody Fragments Directed Against Polypeptide of the Present Invention from a Library of scFvs

[0983] Naturally occurring V-genes isolated from human PBLs are constructed into a library of antibody fragments which contain reactivities against polypeptide of the present invention to which the donor may or may not have been exposed (see e.g., U.S. Pat. No. 5,885,793 incorporated herein by reference in its entirety).

[0984] Rescue of the Library. A library of scFvs is constructed from the RNA of human PBLs as described in International Publication No. WO 92/01047. To rescue phage displaying antibody fragments, approximately 10⁹ E. coli harboring the phagemid are used to inoculate 50 ml of 2×TY containing 1% glucose and 100 μg/ml of ampicillin (2×TY-AMP-GLU) and grown to an O.D. of 0.8 with shaking. Five ml of this culture is used to inoculate 50 ml of 2×TY-AMP-GLU, 2×108 TU of delta gene 3 helper (M13 delta gene III, see International Publication No. WO 92/01047) are added and the culture incubated at 37° C. for 45 minutes without shaking and then at 37° C. for 45 minutes with shaking. The culture is centrifuged at 4000 r.p.m. for 10 min. and the pellet resuspended in 2 liters of 2×TY containing 100 μg/ml ampicillin and 50 ug/ml kanamycin and grown overnight. Phage are prepared as described in International Application No. WO 92/01047.

[0985] M13 delta gene III is prepared as follows: M13 delta gene III helper phage does not encode gene III protein, hence the phage(mid) displaying antibody fragments have a greater avidity of binding to antigen. Infectious M13 delta gene III particles are made by growing the helper phage in cells harboring a pUC19 derivative supplying the wild type gene III protein during phage morphogenesis. The culture is incubated for 1 hour at 37° C. without shaking and then for a further hour at 37° C. with shaking. Cells are spun down (IEC-Centra 8,400 r.p.m. for 10 min), resuspended in 300 ml 2×TY broth containing 100 μg ampicillin/ml and 25 μg kanamycin/ml (2×TY-AMP-KAN) and grown overnight, shaking at 37° C. Phage particles are purified and concentrated from the culture medium by two PEG-precipitations (Sambrook et al., 1990), resuspended in 2 ml PBS and passed through a 0.45 μm filter (Minisart NML; Sartorius) to give a final concentration of approximately 10¹³ transducing units/ml (ampicillin-resistant clones).

[0986] Panning of the Library. Immunotubes (Nunc) are coated overnight in PBS with 4 ml of either 100 μg/ml or 10 μg/ml of a polypeptide of the present invention. Tubes are blocked with 2% Marvel-PBS for 2 hours at 37° C. and then washed 3 times in PBS. Approximately 10¹³ TU of phage is applied to the tube and incubated for 30 minutes at room temperature tumbling on an over and under turntable and then left to stand for another 1.5 hours. Tubes are washed 10 times with PBS 0.1% Tween-20 and 10 times with PBS. Phage are eluted by adding 1 ml of 100 mM triethylamine and rotating 15 minutes on an under and over turntable after which the solution is immediately neutralized with 0.5 ml of 1.0M Tris-HCl, pH 7.4. Phage are then used to infect 10 ml of mid-log E. coli TG1 by incubating eluted phage with bacteria for 30 minutes at 37° C. The E. coli are then plated on TYE plates containing 1% glucose and 100 μg/ml ampicillin. The resulting bacterial library is then rescued with delta gene 3 helper phage as described above to prepare phage for a subsequent round of selection. This process is then repeated for a total of 4 rounds of affinity purification with tube-washing increased to 20 times with PBS, 0.1% Tween-20 and 20 times with PBS for rounds 3 and 4.

[0987] Characterization of Binders. Eluted phage from the 3rd and 4th rounds of selection are used to infect E. coli HB 2151 and soluble scFv is produced (Marks, et al., 1991) from single colonies for assay. ELISAs are performed with microtitre plates coated with 10 pg/ml of the polypeptide of the present invention in 50 mM bicarbonate pH 9.6. Clones positive in ELISA are further characterized by PCR fingerprinting (see, e.g., International Application No. WO 92/01047) and then by sequencing. These ELISA positive clones may also be further characterized by techniques known in the art, such as, for example, epitope mapping, binding affinity, receptor signal transduction, ability to block or competitively inhibit antibody/antigen binding, and competitive agonistic or antagonistic activity.

### Example 11

### Method of Determining Alterations in a Gene Corresponding to a Polynucleotide

[0988] RNA isolated from entire families or individual patients presenting with a phenotype of interest (such as a disease) is isolated. cDNA is then generated from these RNA samples using protocols known in the art. (See, Sambrook.) The cDNA is then used as a template for PCR, employing primers surrounding regions of interest in SEQ ID NO:X; and/or the nucleotide sequence of the cDNA contained in Clone ID NO:Z. Suggested PCR conditions consist of 35 cycles at 95 degrees C. for 30 seconds; 60-120 seconds at 52-58 degrees C.; and 60-120 seconds at 70 degrees C., using buffer solutions described in Sidransky et al., Science 252:706 (1991).

[0989] PCR products are then sequenced using primers labeled at their 5′ end with T4 polynucleotide kinase, employing SequiTherm Polymerase (Epicentre Technologies). The intron-exon boundaries of selected exons is also determined and genomic PCR products analyzed to confirm the results. PCR products harboring suspected mutations are then cloned and sequenced to validate the results of the direct sequencing.

[0990] PCR products are cloned into T-tailed vectors as described in Holton et al., Nucleic Acids Research, 19:1156 (1991) and sequenced with T7 polymerase (United States Biochemical). Affected individuals are identified by mutations not present in unaffected individuals.

[0991] Genomic rearrangements are also observed as a method of determining alterations in a gene corresponding to a polynucleotide. Genomic clones isolated according to Example 2 are nick-translated with digoxigenindeoxy-uridine 5′-triphosphate (Boehringer Manheim), and FISH performed as described in Johnson et al., Methods Cell Biol. 35:73-99 (1991). Hybridization with the labeled probe is carried out using a vast excess of human cot-1 DNA for specific hybridization to the corresponding genomic locus.

[0992] Chromosomes are counterstained with 4,6-diamino-2-phenylidole and propidium iodide, producing a combination of C- and R-bands. Aligned images for precise mapping are obtained using a triple-band filter set (Chroma Technology, Brattleboro, Vt.) in combination with a cooled charge-coupled device camera (Photometrics, Tucson, Ariz.) and variable excitation wavelength filters. (Johnson et al., Genet. Anal. Tech. Appl., 8:75 (1991).) Image collection, analysis and chromosomal fractional length measurements are performed using the ISee Graphical Program System. (Inovision Corporation, Durham, N.C.) Chromosome alterations of the genomic region hybridized by the probe are identified as insertions, deletions, and translocations. These alterations are used as a diagnostic marker for an associated disease.

### Example 12

### Method of Detecting Abnormal Levels of a Polypeptide in a Biological Sample

[0993] A polypeptide of the present invention can be detected in a biological sample, and if an increased or decreased level of the polypeptide is detected, this polypeptide is a marker for a particular phenotype. Methods of detection are numerous, and thus, it is understood that one skilled in the art can modify the following assay to fit their particular needs.

[0994] For example, antibody-sandwich ELISAs are used to detect polypeptides in a sample, preferably a biological sample. Wells of a microtiter plate are coated with specific antibodies, at a final concentration of 0.2 to 10 ug/ml. The antibodies are either monoclonal or polyclonal and are produced by the method described in Example 10. The wells are blocked so that non-specific binding of the polypeptide to the well is reduced.

[0995] The coated wells are then incubated for >2 hours at RT with a sample containing the polypeptide. Preferably, serial dilutions of the sample should be used to validate results. The plates are then washed three times with deionized or distilled water to remove unbound polypeptide.

[0996] Next, 50 ul of specific antibody-alkaline phosphatase conjugate, at a concentration of 25-400 ng, is added and incubated for 2 hours at room temperature. The plates are again washed three times with deionized or distilled water to remove unbound conjugate.

[0997] Add 75 ul of 4-methylumbelliferyl phosphate (MUP) or p-nitrophenyl phosphate (NPP) substrate solution to each well and incubate 1 hour at room temperature. Measure the reaction by a microtiter plate reader. Prepare a standard curve, using serial dilutions of a control sample, and plot polypeptide concentration on the X-axis (log scale) and fluorescence or absorbance of the Y-axis (linear scale). Interpolate the concentration of the polypeptide in the sample using the standard curve.

### Example 13

### Formulation

[0998] The invention also provides methods of treatment and/or prevention of diseases or disorders (such as, for example, any one or more of the diseases or disorders disclosed herein) by administration to a subject of an effective amount of a Therapeutic. By therapeutic is meant polynucleotides or polypeptides of the invention (including fragments and variants), agonists or antagonists thereof, and/or antibodies thereto, in combination with a pharmaceutically acceptable carrier type (e.g., a sterile carrier).

[0999] The Therapeutic will be formulated and dosed in a fashion consistent with good medical practice, taking into account the clinical condition of the individual patient (especially the side effects of treatment with the Therapeutic alone), the site of delivery, the method of administration, the scheduling of administration, and other factors known to practitioners. The “effective amount” for purposes herein is thus determined by such considerations.

[1000] As a general proposition, the total pharmaceutically effective amount of the Therapeutic administered parenterally per dose will be in the range of about 1 ug/kg/day to 10 mg/kg/day of patient body weight, although, as noted above, this will be subject to therapeutic discretion. More preferably, this dose is at least 0.01 mg/kg/day, and most preferably for humans between about 0.01 and 1 mg/kg/day for the hormone. If given continuously, the Therapeutic is typically administered at a dose rate of about 1 ug/kg/hour to about 50 ug/kg/hour, either by 1-4 injections per day or by continuous subcutaneous infusions, for example, using a mini-pump. An intravenous bag solution may also be employed. The length of treatment needed to observe changes and the interval following treatment for responses to occur appears to vary depending on the desired effect.

[1001] Therapeutics can be are administered orally, rectally, parenterally, intracistemally, intravaginally, intraperitoneally, topically (as by powders, ointments, gels, drops or transdermal patch), bucally, or as an oral or nasal spray. “Pharmaceutically acceptable carrier” refers to a non-toxic solid, semisolid or liquid filler, diluent, encapsulating material or formulation auxiliary of any. The term “parenteral” as used herein refers to modes of administration which include intravenous, intramuscular, intraperitoneal, intrasternal, subcutaneous and intraarticular injection and infusion.

[1002] Therapeutics of the invention are also suitably administered by sustained-release systems. Suitable examples of sustained-release Therapeutics are administered orally, rectally, parenterally, intracistemally, intravaginally, intraperitoneally, topically (as by powders, ointments, gels, drops or transdermal patch), bucally, or as an oral or nasal spray. “Pharmaceutically acceptable carrier” refers to a non-toxic solid, semisolid or liquid filler, diluent, encapsulating material or formulation auxiliary of any type. The term “parenteral” as used herein refers to modes of administration which include intravenous, intramuscular, intraperitoneal, intrasternal, subcutaneous and intraarticular injection and infusion.

[1003] Therapeutics of the invention are also suitably administered by sustained-release systems. Suitable examples of sustained-release Therapeutics include suitable polymeric materials (such as, for example, semi-permeable polymer matrices in the form of shaped articles, e.g., films, or mirocapsules), suitable hydrophobic materials (for example as an emulsion in an acceptable oil) or ion exchange resins, and sparingly soluble derivatives (such as, for example, a sparingly soluble salt).

[1004] Sustained-release matrices include polylactides (U.S. Pat. No. 3,773,919, EP 58,481), copolymers of L-glutamic acid and gamma-ethyl-L-glutamate (Sidman et al., Biopolymers 22:547-556 (1983)), poly (2-hydroxyethyl methacrylate) (Langer et al., J. Biomed. Mater. Res. 15:167-277 (1981), and Langer, Chem. Tech. 12:98-105 (1982)), ethylene vinyl acetate (Langer et al., Id.) or poly-D-(−)-3-hydroxybutyric acid (EP 133,988).

[1005] Sustained-release Therapeutics also include liposomally entrapped Therapeutics of the invention (see generally, Langer, Science 249:1527-1533 (1990); Treat et al., in Liposomes in the Therapy of Infectious Disease and Cancer, Lopez-Berestein and Fidler (eds.), Liss, New York, pp. 317-327 and 353-365 (1989)). Liposomes containing the Therapeutic are prepared by methods known per se: DE 3,218,121; Epstein et al., Proc. Natl. Acad. Sci. (USA) 82:3688-3692 (1985); Hwang et al., Proc. Natl. Acad. Sci. (USA) 77:4030-4034 (1980); EP 52,322; EP 36,676; EP 88,046; EP 143,949; EP 142,641; Japanese Pat. Appl. 83-118008; U.S. Pat. Nos. 4,485,045 and 4,544,545; and EP 102,324. Ordinarily, the liposomes are of the small (about 200-800 Angstroms) unilamellar type in which the lipid content is greater than about 30 mol. percent cholesterol, the selected proportion being adjusted for the optimal Therapeutic.

[1006] In yet an additional embodiment, the Therapeutics of the invention are delivered by way of a pump (see Langer, supra; Sefton, CRC Crit. Ref. Biomed. Eng. 14:201 (1987); Buchwald et al., Surgery 88:507 (1980); Saudek et al., N. Engl. J. Med. 321:574 (1989)).

[1007] Other controlled release systems are discussed in the review by Langer (Science 249:1527-1533 (1990)).

[1008] For parenteral administration, in one embodiment, the Therapeutic is formulated generally by mixing it at the desired degree of purity, in a unit dosage injectable form (solution, suspension, or emulsion), with a pharmaceutically acceptable carrier, i.e., one that is non-toxic to recipients at the dosages and concentrations employed and is compatible with other ingredients of the formulation. For example, the formulation preferably does not include oxidizing agents and other compounds that are known to be deleterious to the Therapeutic.

[1009] Generally, the formulations are prepared by contacting the Therapeutic uniformly and intimately with liquid carriers or finely divided solid carriers or both. Then, if necessary, the product is shaped into the desired formulation. Preferably the carrier is a parenteral carrier, more preferably a solution that is isotonic with the blood of the recipient. Examples of such carrier vehicles include water, saline, Ringer's solution, and dextrose solution. Non-aqueous vehicles such as fixed oils and ethyl oleate are also useful herein, as well as liposomes.

[1010] The carrier suitably contains minor amounts of additives such as substances that enhance isotonicity and chemical stability. Such materials are non-toxic to recipients at the dosages and concentrations employed, and include buffers such as phosphate, citrate, succinate, acetic acid, and other organic acids or their salts; antioxidants such as ascorbic acid; low molecular weight (less than about ten residues) polypeptides, e.g., polyarginine or tripeptides; proteins, such as serum albumin, gelatin, or immunoglobulins; hydrophilic polymers such as polyvinylpyrrolidone; amino acids, such as glycine, glutamic acid, aspartic acid, or arginine; monosaccharides, disaccharides, and other carbohydrates including cellulose or its derivatives, glucose, manose, or dextrins; chelating agents such as EDTA; sugar alcohols such as mannitol or sorbitol; counterions such as sodium; and/or nonionic surfactants such as polysorbates, poloxamers, or PEG.

[1011] The Therapeutic is typically formulated in such vehicles at a concentration of about 0.1 mg/ml to 100 mg/ml, preferably 1-10 mg/ml, at a pH of about 3 to 8. It will be understood that the use of certain of the foregoing excipients, carriers, or stabilizers will result in the formation of polypeptide salts.

[1012] Any pharmaceutical used for therapeutic administration can be sterile. Sterility is readily accomplished by filtration through sterile filtration membranes (e.g., 0.2 micron membranes). Therapeutics generally are placed into a container having a sterile access port, for example, an intravenous solution bag or vial having a stopper pierceable by a hypodermic injection needle.

[1013] Therapeutics ordinarily will be stored in unit or multi-dose containers, for example, sealed ampoules or vials, as an aqueous solution or as a lyophilized formulation for reconstitution. As an example of a lyophilized formulation, 10-ml vials are filled with 5 ml of sterile-filtered 1% (w/v) aqueous Therapeutic solution, and the resulting mixture is lyophilized. The infusion solution is prepared by reconstituting the lyophilized Therapeutic using bacteriostatic Water-for-Injection.

[1014] The invention also provides a pharmaceutical pack or kit comprising one or more containers filled with one or more of the ingredients of the Therapeutics of the invention. Associated with such container(s) can be a notice in the form prescribed by a governmental agency regulating the manufacture, use or sale of pharmaceuticals or biological products, which notice reflects approval by the agency of manufacture, use or sale for human administration. In addition, the Therapeutics may be employed in conjunction with other therapeutic compounds.

[1015] The Therapeutics of the invention may be administered alone or in combination with adjuvants. Adjuvants that may be administered with the Therapeutics of the invention include, but are not limited to, alum, alum plus deoxycholate (ImmunoAg), MTP-PE (Biocine Corp.), QS21 (Genentech, Inc.), BCG (e.g., THERACYS®), MPL and nonviable prepartions of Corynebacterium parvum. In a specific embodiment, Therapeutics of the invention are administered in combination with alum. In another specific embodiment, Therapeutics of the invention are administered in combination with QS-21. Further adjuvants that may be administered with the Therapeutics of the invention include, but are not limited to, Monophosphoryl lipid immunomodulator, AdjuVax 100a, QS-21, QS-18, CRL1005, Aluminum salts, MF-59, and Virosomal adjuvant technology. Vaccines that may be administered with the Therapeutics of the invention include, but are not limited to, vaccines directed toward protection against MMR (measles, mumps, rubella), polio, varicella, tetanus/diptheria, hepatitis A, hepatitis B, haemophilus influenzae B, whooping cough, pneumonia, influenza, Lyme's Disease, rotavirus, cholera, yellow fever, Japanese encephalitis, poliomyelitis, rabies, typhoid fever, and pertussis. Combinations may be administered either concomitantly, e.g., as an admixture, separately but simultaneously or concurrently; or sequentially. This includes presentations in which the combined agents are administered together as a therapeutic mixture, and also procedures in which the combined agents are administered separately but simultaneously, e.g., as through separate intravenous lines into the same individual. Administration “in combination” further includes the separate administration of one of the compounds or agents given first, followed by the second.

[1016] The Therapeutics of the invention may be administered alone or in combination with other therapeutic agents. Therapeutic agents that may be administered in combination with the Therapeutics of the invention, include but not limited to, chemotherapeutic agents, antibiotics, steroidal and non-steroidal anti-inflammatories, conventional immunotherapeutic agents, and/or therapeutic treatments described below. Combinations may be administered either concomitantly, e.g., as an admixture, separately but simultaneously or concurrently; or sequentially. This includes presentations in which the combined agents are administered together as a therapeutic mixture, and also procedures in which the combined agents are administered separately but simultaneously, e.g., as through separate intravenous lines into the same individual. Administration “in combination” further includes the separate administration of one of the compounds or agents given first, followed by the second.

[1017] In certain embodiments, Therapeutics of the invention are administered in combination with antiretroviral agents, nucleoside/nucleotide reverse transcriptase inhibitors (NRTIs), non-nucleoside reverse transcriptase inhibitors (NNRTIs), and/or protease inhibitors (PIs). NRTIs that may be administered in combination with the Therapeutics of the invention, include, but are not limited to, RETROVIR™ (zidovudine/AZT), VIDEX™ (didanosine/ddI), HIVID™ (zalcitabine/ddC), ZERIT™ (stavudine/d4T), EPIVIR™ (lamivudine/3TC), and COMBIVIR™ (zidovudine/lamivudine). NNRTIs that may be administered in combination with the Therapeutics of the invention, include, but are not limited to, VIRAMUNE™ (nevirapine), RESCRIPTOR™ (delavirdine), and SUSTIVA™ (efavirenz). Protease inhibitors that may be administered in combination with the Therapeutics of the invention, include, but are not limited to, CRIXIVAN™ (indinavir), NORVIR™ (ritonavir), INVIRASE™ (saquinavir), and VIRACEPT™ (nelfinavir). In a specific embodiment, antiretroviral agents, nucleoside reverse transcriptase inhibitors, non-nucleoside reverse transcriptase inhibitors, and/or protease inhibitors may be used in any combination with Therapeutics of the invention to treat AIDS and/or to prevent or treat HIV infection.

[1018] Additional NRTIs include LODENOSINE™ (F-ddA; an acid-stable adenosine NRTI; Triangle/Abbott; COVIRACIL™ (emtricitabine/FTC; structurally related to lamivudine (3TC) but with 3- to 10-fold greater activity in vitro; Triangle/Abbott); dOTC (BCH-10652, also structurally related to lamivudine but retains activity against a substantial proportion of lamivudine-resistant isolates; Biochem Pharma); Adefovir (refused approval for anti-HIV therapy by FDA; Gilead Sciences); PREVEON® (Adefovir Dipivoxil, the active prodrug of adefovir; its active form is PMEA-pp); TENOFOVIR™ (bis-POC PMPA, a PMPA prodrug; Gilead); DAPD/DXG (active metabolite of DAPD; Triangle/Abbott); D-D4FC (related to 3TC, with activity against AZT/3TC-resistant virus); GW420867X (Glaxo Wellcome); ZIAGEN™ (abacavir/159U89; Glaxo Wellcome Inc.); CS-87 (3′azido-2′,3′-dideoxyuridine; WO 99/66936); and S-acyl-2-thioethyl (SATE)-bearing prodrug forms of β-L-FD4C and β-L-FddC (WO 98/17281).

[1019] Additional NNRTIs include COACTINO™ (Emivirine/MKC-442, potent NNRTI of the HEPT class; Triangle/Abbott); CAPRAVIRINE™ (AG-1549/S-1153, a next generation NNRTI with activity against viruses containing the K103N mutation; Agouron); PNU-142721 (has 20- to 50-fold greater activity than its predecessor delavirdine and is active against K103N mutants; Pharmacia & Upjohn); DPC-961 and DPC-963 (second-generation derivatives of efavirenz, designed to be active against viruses with the K103N mutation; DuPont); GW-420867X (has 25-fold greater activity than HBY097 and is active against K103N mutants; Glaxo Wellcome); CALANOLIDE A (naturally occurring agent from the latex tree; active against viruses containing either or both the Y181C and K103N mutations); and Propolis (WO 99/49830).

[1020] Additional protease inhibitors include LOPINAVIR™ (ABT378/r; Abbott Laboratories); BMS-232632 (an azapeptide; Bristol-Myres Squibb); TIPRANAVIR™ (PNU-140690, a non-peptic dihydropyrone; Pharmacia & Upjohn); PD-178390 (a nonpeptidic dihydropyrone; Parke-Davis); BMS 232632 (an azapeptide; Bristol-Myers Squibb); L-756,423 (an indinavir analog; Merck); DMP-450 (a cyclic urea compound; Avid & DuPont); AG-1776 (a peptidomimetic with in vitro activity against protease inhibitor-resistant viruses; Agouron); VX-175/GW-433908 (phosphate prodrug of amprenavir; Vertex & Glaxo Welcome); CGP61755 (Ciba); and AGENERASE™ (amprenavir; Glaxo Wellcome Inc.).

[1021] Additional antiretroviral agents include fusion inhibitors/gp41 binders. Fusion inhibitors/gp41 binders include T-20 (a peptide from residues 643-678 of the HIV gp41 transmembrane protein ectodomain which binds to gp41 in its resting state and prevents transformation to the fusogenic state; Trimeris) and T-1249 (a second-generation fusion inhibitor; Trimeris).

[1022] Additional antiretroviral agents include fusion inhibitors/chemokine receptor antagonists. Fusion inhibitors/chemokine receptor antagonists include CXCR4 antagonists such as AMD 3100 (a bicyclam), SDF-1 and its analogs, and ALX40-4C (a cationic peptide), T22 (an 18 amino acid peptide; Trimeris) and the T22 analogs T134 and T140; CCR5 antagonists such as RANTES (9-68), AOP-RANTES, NNY-RANTES, and TAK-779; and CCR5/CXCR4 antagonists such as NSC 651016 (a distamycin analog). Also included are CCR2B, CCR3, and CCR6 antagonists. Chemokine receptor agonists such as RANTES, SDF-1, MIP-1α, MIP-1β, etc., may also inhibit fusion.

[1023] Additional antiretroviral agents include integrase inhibitors. Integrase inhibitors include dicaffeoylquinic (DFQA) acids; L-chicoric acid (a dicaffeoyltartaric (DCTA) acid); quinalizarin (QLC) and related anthraquinones; ZINTEVIR™ (AR 177, an oligonucleotide that probably acts at cell surface rather than being a true integrase inhibitor; Arondex); and naphthols such as those disclosed in WO 98/50347.

[1024] Additional antiretroviral agents include hydroxyurea-like compounds such as BCX-34 (a purine nucleoside phosphorylase inhibitor; Biocryst); ribonucleotide reductase inhibitors such as DIDOX™ (Molecules for Health); inosine monophosphate dehydrogenase (IMPDH) inhibitors such as VX-497 (Vertex); and myvopholic acids such as CellCept (mycophenolate mofetil; Roche).

[1025] Additional antiretroviral agents include inhibitors of viral integrase, inhibitors of viral genome nuclear translocation such as arylene bis(methylketone) compounds; inhibitors of HIV entry such as AOP-RANTES, NNY-RANTES, RANTES-IgG fusion protein, soluble complexes of RANTES and glycosaminoglycans (GAG), and AMD-3100; nucleocapsid zinc finger inhibitors such as dithiane compounds; targets of HIV Tat and Rev; and pharmacoenhancers such as ABT-378.

[1026] Other antiretroviral therapies and adjunct therapies include cytokines and lymphokines such as MIP-1α, MIP-1β,SDF-1α, IL-2, PROLEUKIN™ (aldesleukin/L2-7001; Chiron), IL-4, IL-10, IL-12, and IL-13; interferons such as IFN-α2a; antagonists of TNFs, NFκB, GM-CSF, M-CSF, and IL-10; agents that modulate immune activation such as cyclosporin and prednisone; vaccines such as Remune™ (HIV Immunogen), APL 400-003 (Apollon), recombinant gp120 and fragments, bivalent (B/E) recombinant envelope glycoprotein, rgp120CM235, MN rgp120, SF-2 rgp120, gp120/soluble CD4 complex, Delta JR-FL protein, branched synthetic peptide derived from discontinuous gp120 C3/C4 domain, fusion-competent immunogens, and Gag, Pol, Nef, and Tat vaccines; gene-based therapies such as genetic suppressor elements (GSEs; WO 98/54366), and intrakines (genetically modified CC chemokines targetted to the ER to block surface expression of newly synthesized CCR5 (Yang et al., PNAS 94:11567-72 (1997); Chen et al., Nat. Med. 3:1110-16 (1997)); antibodies such as the anti-CXCR4 antibody 12G5, the anti-CCR5 antibodies 2D7, 5C7, PA8, PA9, PA10, PA11, PA12, and PA14, the anti-CD4 antibodies Q4120 and RPA-T4, the anti-CCR3 antibody 7B11, the anti-gp120 antibodies 17b, 48d, 447-52D, 257-D, 268-D and 50.1, anti-Tat antibodies, anti-TNF-α antibodies, and monoclonal antibody 33A; aryl hydrocarbon (AH) receptor agonists and antagonists such as TCDD, 3,3′,4,4′,5-pentachlorobiphenyl, 3,3′,4,4′-tetrachlorobiphenyl, and α-naphthoflavone (WO 98/30213); and antioxidants such as γ-L-glutamyl-L-cysteine ethyl ester (γ-GCE; WO 99/56764).

[1027] In a further embodiment, the Therapeutics of the invention are administered in combination with an antiviral agent. Antiviral agents that may be administered with the Therapeutics of the invention include, but are not limited to, acyclovir, ribavirin, amantadine, and remantidine.

[1028] In other embodiments, Therapeutics of the invention may be administered in combination with anti-opportunistic infection agents. Anti-opportunistic agents that may be administered in combination with the Therapeutics of the invention, include, but are not limited to, TRIMETHOPRIM-SULFAMETHOXAZOLE™, DAPSONE™, PENTAMIDINE™, ATOVAQUONE™, ISONIAZID™, RIFAMPIN™, PYRAZINAMIDE™, ETHAMBUTOL™, RIFABUTIN™, CLARITHROMYCIN™, AZITHROMYCIN™, GANCICLOVIR™, FOSCARNET™, CIDOFOVIR™, FLUCONAZOLE™, ITRACONAZOLE™, KETOCONAZOLE™, ACYCLOVIR™, FAMCICOLVIR™, PYRIMETHAMINE™, LEUCOVORIN™, NEUPOGEN™ (filgrastim/G-CSF), and LEUKINE™ (sargramostim/GM-CSF). In a specific embodiment, Therapeutics of the invention are used in any combination with TRIMETHOPRIM-SULFAMETHOXAZOLE™, DAPSONE™, PENTAMIDINE™, and/or ATOVAQUONE™ to prophylactically treat or prevent an opportunistic Pneumocystis carinii pneumonia infection. In another specific embodiment, Therapeutics of the invention are used in any combination with ISONIAZID™, RIFAMPIN™, PYRAZINAMIDE™, and/or ETHAMBUTOL™ to prophylactically treat or prevent an opportunistic Mycobacterium avium complex infection. In another specific embodiment, Therapeutics of the invention are used in any combination with RIFABUTIN™, CLARITHROMYCIN™, and/or AZITHROMYCIN™ to prophylactically treat or prevent an opportunistic Mycobacterium tuberculosis infection. In another specific embodiment, Therapeutics of the invention are used in any combination with GANCICLOVIR™, FOSCARNET™, and/or CIDOFOVIR™ to prophylactically treat or prevent an opportunistic cytomegalovirus infection. In another specific embodiment, Therapeutics of the invention are used in any combination with FLUCONAZOLE™, ITRACONAZOLE™, and/or KETOCONAZOLE™ to prophylactically treat or prevent an opportunistic fungal infection. In another specific embodiment, Therapeutics of the invention are used in any combination with ACYCLOVIR™ and/or FAMCICOLVIR™ to prophylactically treat or prevent an opportunistic herpes simplex virus type I and/or type II infection. In another specific embodiment, Therapeutics of the invention are used in any combination with PYRIMETHAMINE™ and/or LEUCOVORIN™ to prophylactically treat or prevent an opportunistic Toxoplasma gondii infection. In another specific embodiment, Therapeutics of the invention are used in any combination with LEUCOVORIN™ and/or NEUPOGEN™ to prophylactically treat or prevent an opportunistic bacterial infection.

[1029] In a further embodiment, the Therapeutics of the invention are administered in combination with an antibiotic agent. Antibiotic agents that may be administered with the Therapeutics of the invention include, but are not limited to, amoxicillin, beta-lactamases, aminoglycosides, beta-lactam (glycopeptide), beta-lactamases, Clindamycin, chloramphenicol, cephalosporins, ciprofloxacin, ciprofloxacin, erythromycin, fluoroquinolones, macrolides, metronidazole, penicillins, quinolones, rapamycin, rifampin, streptomycin, sulfonamide, tetracyclines, trimethoprim, trimethoprim-sulfamthoxazole, and vancomycin.

[1030] In other embodiments, Therapeutics of the invention are administered in combination with immunosuppressive agents. Immunosuppressive agents that may be administered in combination with the Therapeutics of the invention include, but are not limited to, steroids, cyclosporine, cyclosporine analogs, cyclophosphamide methylprednisone, prednisone, azathioprine, FK-506, 15-deoxyspergualin, and other immunosuppressive agents that act by suppressing the function of responding T cells. Other immunosuppressive agents that may be administered in combination with the Therapeutics of the invention include, but are not limited to, prednisolone, methotrexate, thalidomide, methoxsalen, rapamycin, leflunomide, mizoribine (BREDININ™), brequinar, deoxyspergualin, and azaspirane (SKF 105685), ORTHOCLONE OKT® 3 (muromonab-CD3), SANDIMMUNE™, NEORAL™, SANGDYA™ (cyclosporine), PROGRAF® (FK506, tacrolimus), CELLCEPT® (mycophenolate motefil, of which the active metabolite is mycophenolic acid), IMURAN™ (azathioprine), glucocorticosteroids, adrenocortical steroids such as DELTASONE™ (prednisone) and HYDELTRASOL™ (prednisolone), FOLEX™ and MEXATE™ (methotrxate), OXSORALEN-ULTRA™ (methoxsalen) and RAPAMUNE™ (sirolimus). In a specific embodiment, immunosuppressants may be used to prevent rejection of organ or bone marrow transplantation.

[1031] In an additional embodiment, Therapeutics of the invention are administered alone or in combination with one or more intravenous immune globulin preparations. Intravenous immune globulin preparations that may be administered with the Therapeutics of the invention include, but not limited to, GAMMAR™, IVEEGAM™, SANDOGLOBULIN™, GAMMAGARD S/D™, ATGAM™ (antithymocyte glubulin), and GAMIMUNET™. In a specific embodiment, Therapeutics of the invention are administered in combination with intravenous immune globulin preparations in transplantation therapy (e.g., bone marrow transplant).

[1032] In certain embodiments, the Therapeutics of the invention are administered alone or in combination with an anti-inflammatory agent. Anti-inflammatory agents that may be administered with the Therapeutics of the invention include, but are not limited to, corticosteroids (e.g. betamethasone, budesonide, cortisone, dexamethasone, hydrocortisone, methylprednisolone, prednisolone, prednisone, and triamcinolone), nonsteroidal anti-inflammatory drugs (e.g., diclofenac, diflunisal, etodolac, fenoprofen, floctafenine, flurbiprofen, ibuprofen, indomethacin, ketoprofen, meclofenamate, mefenamic acid, meloxicam, nabumetone, naproxen, oxaprozin, phenylbutazone, piroxicam, sulindac, tenoxicam, tiaprofenic acid, and tolmetin.), as well as antihistamines, aminoarylcarboxylic acid derivatives, arylacetic acid derivatives, arylbutyric acid derivatives, arylcarboxylic acids, arylpropionic acid derivatives, pyrazoles, pyrazolones, salicylic acid derivatives, thiazinecarboxamides, e-acetamidocaproic acid, S-adenosylmethionine, 3-amino-4-hydroxybutyric acid, amixetrine, bendazac, benzydamine, bucolome, difenpiramide, ditazol, emorfazone, guaiazulene, nabumetone, nimesulide, orgotein, oxaceprol, paranyline, perisoxal, pifoxime, proquazone, proxazole, and tenidap.

[1033] In an additional embodiment, the compositions of the invention are administered alone or in combination with an anti-angiogenic agent. Anti-angiogenic agents that may be administered with the compositions of the invention include, but are not limited to, Angiostatin (Entremed, Rockville, Md.), Troponin-1 (Boston Life Sciences, Boston, Mass.), anti-Invasive Factor, retinoic acid and derivatives thereof, paclitaxel (Taxol), Suramin, Tissue Inhibitor of Metalloproteinase-1, Tissue Inhibitor of Metalloproteinase-2, VEGI, Plasminogen Activator Inhibitor-1, Plasminogen Activator Inhibitor-2, and various forms of the lighter “d group” transition metals.

[1034] Lighter “d group” transition metals include, for example, vanadium, molybdenum, tungsten, titanium, niobium, and tantalum species. Such transition metal species may form transition metal complexes. Suitable complexes of the above-mentioned transition metal species include oxo transition metal complexes.

[1035] Representative examples of vanadium complexes include oxo vanadium complexes such as vanadate and vanadyl complexes. Suitable vanadate complexes include metavanadate and orthovanadate complexes such as, for example, ammonium metavanadate, sodium metavanadate, and sodium orthovanadate. Suitable vanadyl complexes include, for example, vanadyl acetylacetonate and vanadyl sulfate including vanadyl sulfate hydrates such as vanadyl sulfate mono- and trihydrates.

[1036] Representative examples of tungsten and molybdenum complexes also include oxo complexes. Suitable oxo tungsten complexes include tungstate and tungsten oxide complexes. Suitable tungstate complexes include ammonium tungstate, calcium tungstate, sodium tungstate dihydrate, and tungstic acid. Suitable tungsten oxides include tungsten (IV) oxide and tungsten (VI) oxide. Suitable oxo molybdenum complexes include molybdate, molybdenum oxide, and molybdenyl complexes. Suitable molybdate complexes include ammonium molybdate and its hydrates, sodium molybdate and its hydrates, and potassium molybdate and its hydrates. Suitable molybdenum oxides include molybdenum (VI) oxide, molybdenum (VI) oxide, and molybdic acid. Suitable molybdenyl complexes include, for example, molybdenyl acetylacetonate. Other suitable tungsten and molybdenum complexes include hydroxo derivatives derived from, for example, glycerol, tartaric acid, and sugars.

[1037] A wide variety of other anti-angiogenic factors may also be utilized within the context of the present invention. Representative examples include, but are not limited to, platelet factor 4; protamine sulphate; sulphated chitin derivatives (prepared from queen crab shells), (Murata et al., Cancer Res. 51:22-26, (1991)); Sulphated Polysaccharide Peptidoglycan Complex (SP-PG) (the function of this compound may be enhanced by the presence of steroids such as estrogen, and tamoxifen citrate); Staurosporine; modulators of matrix metabolism, including for example, proline analogs, cishydroxyproline, d,L-3,4-dehydroproline, Thiaproline, alpha,alpha-dipyridyl, aminopropionitrile fumarate; 4-propyl-5-(4-pyridinyl)-2(3H)-oxazolone; Methotrexate; Mitoxantrone; Heparin; Interferons; 2 Macroglobulin-serum, ChIMP-3 (Pavloff et al., J. Bio. Chem. 267:17321-17326, (1992)); Chymostatin (Tomkinson et al., Biochem J. 286:475-480, (1992)); Cyclodextrin Tetradecasulfate; Eponemycin; Camptothecin; Fumagillin (Ingber et al., Nature 348:555-557, (1990)); Gold Sodium Thiomalate (“GST”; Matsubara and Ziff, J. Clin. Invest. 79:1440-1446, (1987)); anticollagenase-serum; alpha2-antiplasmin (Holmes et al., J. Biol. Chem. 262(4):1659-1664, (1987)); Bisantrene (National Cancer Institute); Lobenzarit disodium (N-(2)-carboxyphenyl-4-chloroanthronilic acid disodium or “CCA”; (Takeuchi et al., Agents Actions 36:312-316, (1992)); and metalloproteinase inhibitors such as BB94.

[1038] Additional anti-angiogenic factors that may also be utilized within the context of the present invention include Thalidomide, (Celgene, Warren, N.J.); Angiostatic steroid; AGM-1470 (H. Brem and J. Folkman J Pediatr. Surg. 28:445-51 (1993)); an integrin alpha v beta 3 antagonist (C. Storgard et al., J Clin. Invest. 103:47-54 (1999)); carboxynaminolmidazole; Carboxyamidotriazole (CAI) (National Cancer Institute, Bethesda, Md.); Conbretastatin A-4 (CA4P) (OXiGENE, Boston, Mass.); Squalamine (Magainin Pharmaceuticals, Plymouth Meeting, Pa.); TNP-470, (Tap Pharmaceuticals, Deerfield, Ill.); ZD-0101 AstraZeneca (London, UK); APRA (CT2584); Benefin, Byrostatin-1 (SC339555); CGP-41251 (PKC 412); CM101; Dexrazoxane (ICRF187); DMXAA; Endostatin; Flavopridiol; Genestein; GTE; ImmTher; Iressa (ZDl839); Octreotide (Somatostatin); Panretin; Penacillamine; Photopoint; PI-88; Prinomastat (AG-3340) Purlytin; Suradista (FCE26644); Tamoxifen (Nolvadex); Tazarotene; Tetrathiomolybdate; Xeloda (Capecitabine); and 5-Fluorouracil.

[1039] Anti-angiogenic agents that may be administered in combination with the compounds of the invention may work through a variety of mechanisms including, but not limited to, inhibiting proteolysis of the extracellular matrix, blocking the function of endothelial cell-extracellular matrix adhesion molecules, by antagonizing the function of angiogenesis inducers such as growth factors, and inhibiting integrin receptors expressed on proliferating endothelial cells. Examples of anti-angiogenic inhibitors that interfere with extracellular matrix proteolysis and which may be administered in combination with the compositions of the invention include, but are not limited to, AG-3340 (Agouron, La Jolla, Calif.), BAY-12-9566 (Bayer, West Haven, Conn.), BMS-275291 (Bristol Myers Squibb, Princeton, N.J.), CGS-27032A (Novartis, East Hanover, N.J.), Marimastat (British Biotech, Oxford, UK), and Metastat (Aetema, St-Foy, Quebec). Examples of anti-angiogenic inhibitors that act by blocking the function of endothelial cell-extracellular matrix adhesion molecules and which may be administered in combination with the compositions of the invention include, but are not limited to, EMd.-121974 (Merck KcgaA Darmstadt, Germany) and Vitaxin (Ixsys, La Jolla, Calif./Medimmune, Gaithersburg, Md.). Examples of anti-angiogenic agents that act by directly antagonizing or inhibiting angiogenesis inducers and which may be administered in combination with the compositions of the invention include, but are not limited to, Angiozyme (Ribozyme, Boulder, Colo.), Anti-VEGF antibody (Genentech, S. San Francisco, Calif.), PTK-787/ZK-225846 (Novartis, Basel, Switzerland), SU-101 (Sugen, S. San Francisco, Calif.), SU-5416 (Sugen/Pharmacia Upjohn, Bridgewater, N.J.), and SU-6668 (Sugen). Other anti-angiogenic agents act to indirectly inhibit angiogenesis. Examples of indirect inhibitors of angiogenesis which may be administered in combination with the compositions of the invention include, but are not limited to, IM-862 (Cytran, Kirkland, Wash.), Interferon-alpha, IL-12 (Roche, Nutley, N.J.), and Pentosan polysulfate (Georgetown University, Washington, D.C.).

[1040] In particular embodiments, the use of compositions of the invention in combination with anti-angiogenic agents is contemplated for the treatment, prevention, and/or amelioration of an autoimmune disease, such as for example, an autoimmune disease described herein.

[1041] In a particular embodiment, the use of compositions of the invention in combination with anti-angiogenic agents is contemplated for the treatment, prevention, and/or amelioration of arthritis. In a more particular embodiment, the use of compositions of the invention in combination with anti-angiogenic agents is contemplated for the treatment, prevention, and/or amelioration of rheumatoid arthritis.

[1042] In another embodiment, the polynucleotides encoding a polypeptide of the present invention are administered in combination with an angiogenic protein, or polynucleotides encoding an angiogenic protein. Examples of angiogenic proteins that may be administered with the compositions of the invention include, but are not limited to, acidic and basic fibroblast growth factors, VEGF-1, VEGF-2, VEGF-3, epidermal growth factor alpha and beta, platelet-derived endothelial cell growth factor, platelet-derived growth factor, tumor necrosis factor alpha, hepatocyte growth factor, insulin-like growth factor, colony stimulating factor, macrophage colony stimulating factor, granulocyte/macrophage colony stimulating factor, and nitric oxide synthase.

[1043] In additional embodiments, compositions of the invention are administered in combination with a chemotherapeutic agent. Chemotherapeutic agents that may be administered with the Therapeutics of the invention include, but are not limited to alkylating agents such as nitrogen mustards (for example, Mechlorethamine, cyclophosphamide, Cyclophosphamide Ifosfamide, Melphalan (L-sarcolysin), and Chlorambucil), ethylenimines and methylmelamines (for example, Hexamethylmelamine and Thiotepa), alkyl sulfonates (for example, Busulfan), nitrosoureas (for example, Carmustine (BCNU), Lomustine (CCNU), Semustine (methyl-CCNU), and Streptozocin (streptozotocin)), triazenes (for example, Dacarbazine (DTIC; dimethyltriazenoimidazolecarboxamide)), folic acid analogs (for example, Methotrexate (amethopterin)), pyrimidine analogs (for example, Fluorouacil (5-fluorouracil; 5-FU), Floxuridine (fluorodeoxyuridine; FudR), and Cytarabine (cytosine arabinoside)), purine analogs and related inhibitors (for example, Mercaptopurine (6-mercaptopurine; 6-MP), Thioguanine (6-thioguanine; TG), and Pentostatin (2′-deoxycoformycin)), vinca alkaloids (for example, Vinblastine (VLB, vinblastine sulfate) and Vincristine (vincristine sulfate)), epipodophyllotoxins (for example, Etoposide and Teniposide), antibiotics (for example, Dactinomycin (actinomycin D), Daunorubicin (daunomycin; rubidomycin), Doxorubicin, Bleomycin, Plicamycin (mithramycin), and Mitomycin (mitomycin C), enzymes (for example, L-Asparaginase), biological response modifiers (for example, Interferon-alpha and interferon-alpha-2b), platinum coordination compounds (for example, Cisplatin (cis-DDP) and Carboplatin), anthracenedione (Mitoxantrone), substituted ureas (for example, Hydroxyurea), methylhydrazine derivatives (for example, Procarbazine (N-methylhydrazine; MIH), adrenocorticosteroids (for example, Prednisone), progestins (for example, Hydroxyprogesterone caproate, Medroxyprogesterone, Medroxyprogesterone acetate, and Megestrol acetate), estrogens (for example, Diethylstilbestrol (DES), Diethylstilbestrol diphosphate, Estradiol, and Ethinyl estradiol), antiestrogens (for example, Tamoxifen), androgens (Testosterone proprionate, and Fluoxymesterone), antiandrogens (for example, Flutamide), gonadotropin-releasing horomone analogs (for example, Leuprolide), other hormones and hormone analogs (for example, methyltestosterone, estramustine, estramustine phosphate sodium, chlorotrianisene, and testolactone), and others (for example, dicarbazine, glutamic acid, and mitotane).

[1044] In one embodiment, the compositions of the invention are administered in combination with one or more of the following drugs: infliximab (also known as Remicade™ Centocor, Inc.), Trocade (Roche, RO-32-3555), Leflunomide (also known as Arava™ from Hoechst Marion Roussel), Kineret™ (an IL-1 Receptor antagonist also known as Anakinra from Amgen, Inc.).

[1045] In a specific embodiment, compositions of the invention are administered in combination with CHOP (cyclophosphamide, doxorubicin, vincristine, and prednisone) or combination of one or more of the components of CHOP. In one embodiment, the compositions of the invention are administered in combination with anti-CD20 antibodies, human monoclonal anti-CD20 antibodies. In another embodiment, the compositions of the invention are administered in combination with anti-CD20 antibodies and CHOP, or anti-CD20 antibodies and any combination of one or more of the components of CHOP, particularly cyclophosphamide and/or prednisone. In a specific embodiment, compositions of the invention are administered in combination with Rituximab. In a further embodiment, compositions of the invention are administered with Rituximab and CHOP, or Rituximab and any combination of one or more of the components of CHOP, particularly cyclophosphamide and/or prednisone. In a specific embodiment, compositions of the invention are administered in combination with tositumomab. In a further embodiment, compositions of the invention are administered with tositumomab and CHOP, or tositumomab and any combination of one or more of the components of CHOP, particularly cyclophosphamide and/or prednisone. The anti-CD20 antibodies may optionally be associated with radioisotopes, toxins or cytotoxic prodrugs.

[1046] In another specific embodiment, the compositions of the invention are administered in combination Zevalin™. In a further embodiment, compositions of the invention are administered with Zevalin™ and CHOP, or Zevalin™ and any combination of one or more of the components of CHOP, particularly cyclophosphamide and/or prednisone. Zevalin™ may be associated with one or more radisotopes. Particularly preferred isotopes are ⁹⁰U and ¹¹¹In.

[1047] In an additional embodiment, the Therapeutics of the invention are administered in combination with cytokines. Cytokines that may be administered with the Therapeutics of the invention include, but are not limited to, IL2, IL3, IL4, IL5, IL6, IL7, IL10, IL12, IL13, IL15, anti-CD40, CD40L, IFN-gamma and TNF-alpha. In another embodiment, Therapeutics of the invention may be administered with any interleukin, including, but not limited to, IL-1alpha, IL-1beta, IL-2, IL-3, IL-4, IL-5, IL-6, IL-7, IL-8, IL-9, IL-10, IL-11, IL-12, IL-13, IL-14, IL-15, IL-16, IL-17, IL-18, IL-19, IL-20, and IL-21.

[1048] In one embodiment, the Therapeutics of the invention are administered in combination with members of the TNF family. TNF, TNF-related or TNF-like molecules that may be administered with the Therapeutics of the invention include, but are not limited to, soluble forms of TNF-alpha, lymphotoxin-alpha (LT-alpha, also known as TNF-beta), LT-beta (found in complex heterotrimer LT-alpha2-beta), OPGL, FasL, CD27L, CD30L, CD40L, 4-1BBL, DcR3, OX40L, TNF-gamma (International Publication No. WO 96/14328), AIM-I (International Publication No. WO 97/33899), endokine-alpha (International Publication No. WO 98/07880), OPG, and neutrokine-alpha (International Publication No. WO 98/18921, OX40, and nerve growth factor (NGF), and soluble forms of Fas, CD30, CD27, CD40 and 4-1BB, TR2 (International Publication No. WO 96/34095), DR3 (International Publication No. WO 97/33904), DR4 (International Publication No. WO 98/32856), TR5 (International Publication No. WO 98/30693), TRANK, TR9 (International Publication No. WO 98/56892), TR10 (International Publication No. WO 98/54202), 312C2 (International Publication No. WO 98/06842), and TR12, and soluble forms CD154, CD70, and CD153.

[1049] In an additional embodiment, the Therapeutics of the invention are administered in combination with angiogenic proteins. Angiogenic proteins that may be administered with the Therapeutics of the invention include, but are not limited to, Glioma Derived Growth Factor (GDGF), as disclosed in European Patent Number EP-399816; Platelet Derived Growth Factor-A (PDGF-A), as disclosed in European Patent Number EP-682110; Platelet Derived Growth Factor-B (PDGF-B), as disclosed in European Patent Number EP-282317; Placental Growth Factor (PIGF), as disclosed in International Publication Number WO 92/06194; Placental Growth Factor-2 (PIGF-2), as disclosed in Hauser et al., Growth Factors, 4:259-268 (1993); Vascular Endothelial Growth Factor (VEGF), as disclosed in International Publication Number WO 90/13649; Vascular Endothelial Growth Factor-A (VEGF-A), as disclosed in European Patent Number EP-506477; Vascular Endothelial Growth Factor-2 (VEGF-2), as disclosed in International Publication Number WO 96/39515; Vascular Endothelial Growth Factor B (VEGF-3); Vascular Endothelial Growth Factor B-186 (VEGF-B186), as disclosed in International Publication Number WO 96/26736; Vascular Endothelial Growth Factor-D (VEGF-D), as disclosed in International Publication Number WO 98/02543; Vascular Endothelial Growth Factor-D (VEGF-D), as disclosed in International Publication Number WO 98/07832; and Vascular Endothelial Growth Factor-E (VEGF-E), as disclosed in German Patent Number DE19639601. The above mentioned references are herein incorporated by reference in their entireties.

[1050] In an additional embodiment, the Therapeutics of the invention are administered in combination with Fibroblast Growth Factors. Fibroblast Growth Factors that may be administered with the Therapeutics of the invention include, but are not limited to, FGF-1, FGF-2, FGF-3, FGF-4, FGF-5, FGF-6, FGF-7, FGF-8, FGF-9, FGF-10, FGF-11, FGF-12, FGF-13, FGF-14, and FGF-15.

[1051] In an additional embodiment, the Therapeutics of the invention are administered in combination with hematopoietic growth factors. Hematopoietic growth factors that may be administered with the Therapeutics of the invention include, but are not limited to, granulocyte macrophage colony stimulating factor (GM-CSF) (sargramostim, LEUKINE™, PROKINE™), granulocyte colony stimulating factor (G-CSF) (filgrastim, NEUPOGEN”), macrophage colony stimulating factor (M-CSF, CSF-1) erythropoietin (epoetin alfa, EPOGEN™, PROCRIT™), stem cell factor (SCF, c-kit ligand, steel factor), megakaryocyte colony stimulating factor, PIXY321 (a GMCSF/IL-3 fusion protein), interleukins, especially any one or more of IL-1 through IL-12, interferon-gamma, or thrombopoietin.

[1052] In certain embodiments, Therapeutics of the present invention are administered in combination with adrenergic blockers, such as, for example, acebutolol, atenolol, betaxolol, bisoprolol, carteolol, labetalol, metoprolol, nadolol, oxprenolol, penbutolol, pindolol, propranolol, sotalol, and timolol.

[1053] In another embodiment, the Therapeutics of the invention are administered in combination with an antiarrhythmic drug (e.g., adenosine, amidoarone, bretylium, digitalis, digoxin, digitoxin, diliazem, disopyramide, esmolol, flecainide, lidocaine, mexiletine, moricizine, phenytoin, procainamide, N-acetyl procainamide, propafenone, propranolol, quinidine, sotalol, tocainide, and verapamil).

[1054] In another embodiment, the Therapeutics of the invention are administered in combination with diuretic agents, such as carbonic anhydrase-inhibiting agents (e.g., acetazolamide, dichlorphenamide, and methazolamide), osmotic diuretics (e.g., glycerin, isosorbide, mannitol, and urea), diuretics that inhibit Na⁺—K⁺—2Cl⁻ symport (e.g., furosemide, bumetanide, azosemide, piretanide, tripamide, ethacrynic acid, muzolimine, and torsemide), thiazide and thiazide-like diuretics (e.g., bendroflumethiazide, benzthiazide, chlorothiazide, hydrochlorothiazide, hydroflumethiazide, methyclothiazide, polythiazide, trichormethiazide, chlorthalidone, indapamide, metolazone, and quinethazone), potassium sparing diuretics (e.g., amiloride and triamterene), and mineralcorticoid receptor antagonists (e.g., spironolactone, canrenone, and potassium canrenoate).

[1055] In one embodiment, the Therapeutics of the invention are administered in combination with treatments for endocrine and/or hormone imbalance disorders. Treatments for endocrine and/or hormone imbalance disorders include, but are not limited to, ¹²⁷I, radioactive isotopes of iodine such as ¹³¹I and ¹²³I; and 1231; recombinant growth hormone, such as HUMATROPE™ (recombinant somatropin); growth hormone analogs such as PROTROPIN™ (somatrem); dopamine agonists such as PARLODEL™ (bromocriptine); somatostatin analogs such as SANDOSTATIN™ (octreotide); gonadotropin preparations such as PREGNYL™, A.P.L.™ and PROFASI™ (chorionic gonadotropin (CG)), PERGONAL™ (menotropins), and METRODI™ (urofollitropin (uFSH)); synthetic human gonadotropin releasing hormone preparations such as FACTREL™ and LUTREPULSE™ (gonadorelin hydrochloride); synthetic gonadotropin agonists such as LUPRON™ (leuprolide acetate), SUPPRELIN™ (histrelin acetate), SYNAREL™ (nafarelin acetate), and ZOLADEX™ (goserelin acetate); synthetic preparations of thyrotropin-releasing hormone such as RELEFACT TRH™ and THYPINONE™ (protirelin); recombinant human TSH such as THYROGEN™; synthetic preparations of the sodium salts of the natural isomers of thyroid hormones such as L-T₄™, SYNTHROID™ and LEVOTHROID™ (levothyroxine sodium), L-T₃™, CYTOMEL™ and TRIOSTAT™ (liothyroine sodium), and THYROLAR™ (liotrix); antithyroid compounds such as 6-n-propylthiouracil (propylthiouracil), 1-methyl-2-mercaptoimidazole and TAPAZOLE™ (methimazole), NEO-MERCAZOLE™ (carbimazole); beta-adrenergic receptor antagonists such as propranolol and esmolol; Ca²⁺ channel blockers; dexamethasone and iodinated radiological contrast agents such as TELEPAQUE™ (iopanoic acid) and ORAGRAFIN™ (sodium ipodate); estrogens or congugated estrogens such as ESTRACE™ (estradiol), ESTINYL™ (ethinyl estradiol), PREMARIN™, ESTRATAB™, ORTHO-EST™, OGEN™ and estropipate (estrone), ESTROVIS™ (quinestrol), ESTRADERM™ (estradiol), DELESTROGEN™ and VALERGEN™ (estradiol valerate), DEPO-ESTRADIOL CYPIONATE™ and ESTROJECT LA™ (estradiol cypionate); antiestrogens such as NOLVADEX™ (tamoxifen), SEROPHENE™ and CLOMID™ (clomiphene); progestins such as DURALUTIN™ (hydroxyprogesterone caproate), MPA™ and DEPO-PROVERA™ (medroxyprogesterone acetate), PROVERA™ and CYCRIN™ (MPA), MEGACE™ (megestrol acetate), NORLUTIN™ (norethindrone), and NORLUTATE™ and AYGESTIN™ (norethindrone acetate); progesterone implants such as NORPLANT SYSTEM™ (subdermal implants of norgestrel); antiprogestins such as RU 486™ (mifepristone); hormonal contraceptives such as ENOVID™ (norethynodrel plus mestranol), PROGESTASERT™ (intrauterine device that releases progesterone), LOESTRIN™, BREVICON™, MODICON™, GENORA™, NELONA™, NORINYL™, OVACON-35™ and OVACON-50™ (ethinyl estradiol/norethindrone), LEVLEN™, NORDETTE™, TRI-LEVLEN™ and TRIPHASIL-21™ (ethinyl estradiol/levonorgestrel) LO/OVRAL™ and OVRAL™ (ethinyl estradiol/norgestrel), DEMULEN™ (ethinyl estradiol/ethynodiol diacetate), NORINYL™, ORTHO-NOVUM™, NORETHIN™, GENORA™, and NELOVA™ (norethindrone/mestranol), DESOGEN™ and ORTHO-CEPT™ (ethinyl estradiol/desogestrel), ORTHO-CYCLEN™ and ORTHO-TRICYCLEN™ (ethinyl estradiol/norgestimate), MICRONOR™ and NOR-QD™ (norethindrone), and OVRETTE™ (norgestrel); testosterone esters such as methenolone acetate and testosterone undecanoate; parenteral and oral androgens such as TESTOJECT-50™ (testosterone), TESTEX™ (testosterone propionate), DELATESTRYL™ (testosterone enanthate), DEPO-TESTOSTERONET™ (testosterone cypionate), DANOCRINE™ (danazol), HALOTESTIN™ (fluoxymesterone), ORETON METHYL™, TESTRED™ and VIRILON™ (methyltestosterone), and OXANDRIN™ (oxandrolone); testosterone transdermal systems such as TESTODERM™; androgen receptor antagonist and 5-alpha-reductase inhibitors such as ANDROCUR™ (cyproterone acetate), EULEXIN™ (flutamide), and PROSCAR™ (finasteride); adrenocorticotropic hormone preparations such as CORTROSYN™ (cosyntropin); adrenocortical steroids and their synthetic analogs, such as ACLOVATE™ (alclometasone dipropionate), CYCLOCORT™ (amcinonide), BECLOVENT™ and VANCERIL™ (beclomethasone dipropionate), CELESTONE™ (betamethasone), BENISONE™ and UTICORT™ (betamethasone benzoate), DIPROSONE™ (betamethasone dipropionate), CELESTONE PHOSPHATE™ (betamethasone sodium phosphate), CELESTONE SOLUSPAN™ (betamethasone sodium phosphate and acetate), BETA-VAL™ and VALISONE™ (betamethasone valerate), TEMOVATE™ (clobetasol propionate), CLODERM™ (clocortolone pivalate), CORTEF™ and HYDROCORTONE™ (cortisol (hydrocortisone)), HYDROCORTONE ACETATE™ (cortisol (hydrocortisone) acetate), LOCOID™ (cortisol (hydrocortisone) butyrate), HYDROCORTONE PHOSPHATE™ (cortisol (hydrocortisone) sodium phosphate), A-HYDROCORT™ and SOLU CORTEF™ (cortisol (hydrocortisone) sodium succinate), WESTCORT™ (cortisol (hydrocortisone) valerate), CORTISONE ACETATE™ (cortisone acetate), DESOWEN™ and TRIDESILON™ (desonide), TOPICORT™ (desoximetasone), DECADRON™ (dexamethasone), DECADRON LA™ (dexamethasone acetate), DECADRON PHOSPHATE™ and HEXADROL PHOSPHATE™ (dexamethasone sodium phosphate), FLORONE™ and MAXIFLOR™ (diflorasone diacetate), FLORINEF ACETATE™ (fludrocortisone acetate), AEROBID™ and NASALIDE™ (flunisolide), FLUONID™ and SYNALAR™ (fluocinolone acetonide), LIDEX™ (fluocinonide), FLUOR-OP™ and FML™ (fluorometholone), CORDRAN™ (flurandrenolide), HALOG™ (halcinonide), HMS LIZUIFILM™ (medrysone), MEDROL™ (methylprednisolone), DEPO-MEDROL™ and MEDROL ACETATE™ (methylprednisone acetate), A-METHAPRED™ and SOLUMEDROL™ (methylprednisolone sodium succinate), ELOCON™ (mometasone furoate), HALDRONE™ (paramethasone acetate), DELTA-CORTEF™ (prednisolone), ECONOPRED™ (prednisolone acetate), HYDELTRASOL™ (prednisolone sodium phosphate), HYDELTRA-T.B.A™ (prednisolone tebutate), DELTASONE™ (prednisone), ARISTOCORT™ and KENACORT™ (triamcinolone), KENALOG™ (triamcinolone acetonide), ARISTOCORT™ and KENACORT DIACETATE™ (triamcinolone diacetate), and ARISTOSPAN™ (triamcinolone hexacetonide); inhibitors of biosynthesis and action of adrenocortical steroids such as CYTADREN™ (aminoglutethimide), NIZORAL™ (ketoconazole), MODRASTANE™ (trilostane), and METOPIRONE™ (metyrapone); bovine, porcine or human insulin or mixtures thereof; insulin analogs; recombinant human insulin such as HUMULIN™ and NOVOLIN™; oral hypoglycemic agents such as ORAMIDE™ and ORINASE™ (tolbutamide), DIABINESE™ (chlorpropamide), TOLAMIDE™ and TOLINASE™ (tolazamide), DYMELOR™ (acetohexamide), glibenclamide, MICRONASE™, DIBETA™ and GLYNASE™ (glyburide), GLUCOTROL™ (glipizide), and DIAMICRON™ (gliclazide), GLUCOPHAGE™ (metformin), ciglitazone, pioglitazone, and alpha-glucosidase inhibitors; bovine or porcine glucagon; somatostatins such as SANDOSTATIN™ (octreotide); and diazoxides such as PROGLYCEM™ (diazoxide).

[1056] In one embodiment, the Therapeutics of the invention are administered in combination with treatments for uterine motility disorders. Treatments for uterine motility disorders include, but are not limited to, estrogen drugs such as conjugated estrogens (e.g., PREMARIN® and ESTRATAB®), estradiols (e.g., CLIMARA® and ALORA®), estropipate, and chlorotrianisene; progestin drugs (e.g., AMEN® (medroxyprogesterone), MICRONOR® (norethidrone acetate), PROMETRIUM® progesterone, and megestrol acetate); and estrogen/progesterone combination therapies such as, for example, conjugated estrogens/medroxyprogesterone (e.g., PREMPRO™ and PREMPHASE®) and norethindrone acetate/ethinyl estsradiol (e.g., FEMHRT™).

[1057] In an additional embodiment, the Therapeutics of the invention are administered in combination with drugs effective in treating iron deficiency and hypochromic anemias, including but not limited to, ferrous sulfate (iron sulfate, FEOSOL™), ferrous fumarate (e.g., FEOSTAT™), ferrous gluconate (e.g., FERGON™), polysaccharide-iron complex (e.g., NIFEREX™), iron dextran injection (e.g., INFED™), cupric sulfate, pyroxidine, riboflavin, Vitamin B12, cyancobalamin injection (e.g., REDISOL™, RUBRAMIN PC™), hydroxocobalamin, folic acid (e.g., FOLVITE™), leucovorin (folinic acid, 5-CHOH4PteGlu, citrovorum factor) or WELLCOVORIN (Calcium salt of leucovorin), transferrin or ferritin.

[1058] In certain embodiments, the Therapeutics of the invention are administered in combination with agents used to treat psychiatric disorders. Psychiatric drugs that may be administered with the Therapeutics of the invention include, but are not limited to, antipsychotic agents (e.g., chlorpromazine, chlorprothixene, clozapine, fluphenazine, haloperidol, loxapine, mesoridazine, molindone, olanzapine, perphenazine, pimozide, quetiapine, risperidone, thioridazine, thiothixene, trifluoperazine, and triflupromazine), antimanic agents (e.g., carbamazepine, divalproex sodium, lithium carbonate, and lithium citrate), antidepressants (e.g., amitriptyline, amoxapine, bupropion, citalopram, clomipramine, desipramine, doxepin, fluvoxamine, fluoxetine, imipramine, isocarboxazid, maprotiline, mirtazapine, nefazodone, nortriptyline, paroxetine, phenelzine, protriptyline, sertraline, tranylcypromine, trazodone, trimipramine, and venlafaxine), antianxiety agents (e.g., alprazolam, buspirone, chlordiazepoxide, clorazepate, diazepam, halazepam, lorazepam, oxazepam, and prazepam), and stimulants (e.g., d-amphetamine, methylphenidate, and pemoline).

[1059] In other embodiments, the Therapeutics of the invention are administered in combination with agents used to treat neurological disorders. Neurological agents that may be administered with the Therapeutics of the invention include, but are not limited to, antiepileptic agents (e.g., carbamazepine, clonazepam, ethosuximide, phenobarbital, phenytoin, primidone, valproic acid, divalproex sodium, felbamate, gabapentin, lamotrigine, levetiracetam, oxcarbazepine, tiagabine, topiramate, zonisamide, diazepam, lorazepam, and clonazepam), antiparkinsonian agents (e.g., levodopa/carbidopa, selegiline, amantidine, bromocriptine, pergolide, ropinirole, pramipexole, benztropine; biperiden; ethopropazine; procyclidine; trihexyphenidyl, tolcapone), and ALS therapeutics (e.g. riluzole).

[1060] In another embodiment, Therapeutics of the invention are administered in combination with vasodilating agents and/or calcium channel blocking agents. Vasodilating agents that may be administered with the Therapeutics of the invention include, but are not limited to, Angiotensin Converting Enzyme (ACE) inhibitors (e.g., papaverine, isoxsuprine, benazepril, captopril, cilazapril, enalapril, enalaprilat, fosinopril, lisinopril, moexipril, perindopril, quinapril, ramipril, spirapril, trandolapril, and nylidrin), and nitrates (e.g., isosorbide dinitrate, isosorbide mononitrate, and nitroglycerin). Examples of calcium channel blocking agents that may be administered in combination with the Therapeutics of the invention include, but are not limited to amlodipine, bepridil, diltiazem, felodipine, flunarizine, isradipine, nicardipine, nifedipine, nimodipine, and verapamil.

[1061] In additional embodiments, the Therapeutics of the invention are administered in combination with other therapeutic or prophylactic regimens, such as, for example, radiation therapy.

### Example 14

### Method of Treating Decreased Levels of the Polypeptide

[1062] The present invention relates to a method for treating an individual in need of an increased level of a polypeptide of the invention in the body comprising administering to such an individual a composition comprising a therapeutically effective amount of an agonist of the invention (including polypeptides of the invention). Moreover, it will be appreciated that conditions caused by a decrease in the standard or normal expression level of a polypeptide of the present invention in an individual can be treated by administering the agonist or antagonist of the present invention. Thus, the invention also provides a method of treatment of an individual in need of an increased level of the polypeptide comprising administering to such an individual a Therapeutic comprising an amount of the agonist or antagonist to increase the activity level of the polypeptide in such an individual.

[1063] For example, a patient with decreased levels of a polypeptide receives a daily dose 0.1-100 ug/kg of the agonist or antagonist for six consecutive days. The exact details of the dosing scheme, based on administration and formulation, are provided in Example 13.

### Example 15

### Method of Treating Increased Levels of the Polypeptide

[1064] The present invention also relates to a method of treating an individual in need of a decreased level of a polypeptide of the invention in the body comprising administering to such an individual a composition comprising a therapeutically effective amount of an antagonist of the invention (including polypeptides and antibodies of the invention).

[1065] In one example, antisense technology is used to inhibit production of a polypeptide of the present invention. This technology is one example of a method of decreasing levels of a polypeptide, due to a variety of etiologies, such as cancer.

[1066] For example, a patient diagnosed with abnormally increased levels of a polypeptide is administered intravenously antisense polynucleotides at 0.5, 1.0, 1.5, 2.0 and 3.0 mg/kg day for 21 days. This treatment is repeated after a 7-day rest period if the treatment was well tolerated. The formulation of the antisense polynucleotide is provided in Example 13.

### Example 16

### Method of Treatment Using Gene Therapy—Ex Vivo

[1067] One method of gene therapy transplants fibroblasts, which are capable of expressing a polypeptide, onto a patient. Generally, fibroblasts are obtained from a subject by skin biopsy. The resulting tissue is placed in tissue-culture medium and separated into small pieces. Small chunks of the tissue are placed on a wet surface of a tissue culture flask, approximately ten pieces are placed in each flask. The flask is turned upside down, closed tight and left at room temperature over night. After 24 hours at room temperature, the flask is inverted and the chunks of tissue remain fixed to the bottom of the flask and fresh media (e.g., Ham's F12 media, with 10% FBS, penicillin and streptomycin) is added. The flasks are then incubated at 37 degree C. for approximately one week.

[1068] At this time, fresh media is added and subsequently changed every several days. After an additional two weeks in culture, a monolayer of fibroblasts emerge. The monolayer is trypsinized and scaled into larger flasks.

[1069] pMV-7 (Kirschmeier, P. T. et al., DNA, 7:219-25 (1988)), flanked by the long terminal repeats of the Moloney murine sarcoma virus, is digested with EcoRI and HindIII and subsequently treated with calf intestinal phosphatase. The linear vector is fractionated on agarose gel and purified, using glass beads.

[1070] The cDNA encoding a polypeptide of the present invention can be amplified using PCR primers which correspond to the 5′ and 3′ end sequences respectively as set forth in Example 1 using primers and having appropriate restriction sites and initiation/stop codons, if necessary. Preferably, the 5′ primer contains an EcoRI site and the 3′ primer includes a HindIII site. Equal quantities of the Moloney murine sarcoma virus linear backbone and the amplified EcoRI and HindIII fragment are added together, in the presence of T4 DNA ligase. The resulting mixture is maintained under conditions appropriate for ligation of the two fragments. The ligation mixture is then used to transform bacteria HB101, which are then plated onto agar containing kanamycin for the purpose of confirming that the vector has the gene of interest properly inserted.

[1071] The amphotropic pA317 or GP+am12 packaging cells are grown in tissue culture to confluent density in Dulbecco's Modified Eagles Medium (DMEM) with 10% calf serum (CS), penicillin and streptomycin. The MSV vector containing the gene is then added to the media and the packaging cells transduced with the vector. The packaging cells now produce infectious viral particles containing the gene (the packaging cells are now referred to as producer cells).

[1072] Fresh media is added to the transduced producer cells, and subsequently, the media is harvested from a 10 cm plate of confluent producer cells. The spent media, containing the infectious viral particles, is filtered through a millipore filter to remove detached producer cells and this media is then used to infect fibroblast cells. Media is removed from a sub-confluent plate of fibroblasts and quickly replaced with the media from the producer cells. This media is removed and replaced with fresh media. If the titer of virus is high, then virtually all fibroblasts will be infected and no selection is required. If the titer is very low, then it is necessary to use a retroviral vector that has a selectable marker, such as neo or his. Once the fibroblasts have been efficiently infected, the fibroblasts are analyzed to determine whether protein is produced.

[1073] The engineered fibroblasts are then transplanted onto the host, either alone or after having been grown to confluence on cytodex 3 microcarrier beads.

### Example 17

### Gene Therapy Using Endogenous Genes Corresponding to Polynucleotides of the Invention

[1074] Another method of gene therapy according to the present invention involves operably associating the endogenous polynucleotide sequence of the invention with a promoter via homologous recombination as described, for example, in U.S. Pat. No. 5,641,670, issued Jun. 24, 1997; International Publication NO: WO 96/29411, published Sep. 26, 1996; International Publication NO: WO 94/12650, published Aug. 4, 1994; Koller et al., Proc. Natl. Acad. Sci. USA, 86:8932-8935 (1989); and Zijlstra et al., Nature, 342:435-438 (1989). This method involves the activation of a gene which is present in the target cells, but which is not expressed in the cells, or is expressed at a lower level than desired.

[1075] Polynucleotide constructs are made which contain a promoter and targeting sequences, which are homologous to the 5′ non-coding sequence of endogenous polynucleotide sequence, flanking the promoter. The targeting sequence will be sufficiently near the 5′ end of the polynucleotide sequence so the promoter will be operably linked to the endogenous sequence upon homologous recombination. The promoter and the targeting sequences can be amplified using PCR. Preferably, the amplified promoter contains distinct restriction enzyme sites on the 5′ and 3′ ends. Preferably, the 3′ end of the first targeting sequence contains the same restriction enzyme site as the 5′ end of the amplified promoter and the 5′ end of the second targeting sequence contains the same restriction site as the 3′ end of the amplified promoter.

[1076] The amplified promoter and the amplified targeting sequences are digested with the appropriate restriction enzymes and subsequently treated with calf intestinal phosphatase. The digested promoter and digested targeting sequences are added together in the presence of T4 DNA ligase. The resulting mixture is maintained under conditions appropriate for ligation of the two fragments. The construct is size fractionated on an agarose gel, then purified by phenol extraction and ethanol precipitation.

[1077] In this Example, the polynucleotide constructs are administered as naked polynucleotides via electroporation. However, the polynucleotide constructs may also be administered with transfection-facilitating agents, such as liposomes, viral sequences, viral particles, precipitating agents, etc. Such methods of delivery are known in the art.

[1078] Once the cells are transfected, homologous recombination will take place which results in the promoter being operably linked to the endogenous polynucleotide sequence. This results in the expression of polynucleotide corresponding to the polynucleotide in the cell. Expression may be detected by immunological staining, or any other method known in the art.

[1079] Fibroblasts are obtained from a subject by skin biopsy. The resulting tissue is placed in DMEM+10% fetal calf serum. Exponentially growing or early stationary phase fibroblasts are trypsinized and rinsed from the plastic surface with nutrient medium. An aliquot of the cell suspension is removed for counting, and the remaining cells are subjected to centrifugation. The supernatant is aspirated and the pellet is resuspended in 5 ml of electroporation buffer (20 mM HEPES pH 7.3, 137 mM NaCl, 5 mM KCl, 0.7 mM Na₂ HPO₄, 6 mM dextrose). The cells are recentrifuged, the supernatant aspirated, and the cells resuspended in electroporation buffer containing 1 mg/ml acetylated bovine serum albumin. The final cell suspension contains approximately 3×10⁶ cells/ml. Electroporation should be performed immediately following resuspension.

[1080] Plasmid DNA is prepared according to standard techniques. For example, to construct a plasmid for targeting to the locus corresponding to the polynucleotide of the invention, plasmid pUC18 (MBI Fermentas, Amherst, N.Y.) is digested with HindIII. The CMV promoter is amplified by PCR with an XbaI site on the 5′ end and a BamHI site on the 3′ end. Two non-coding sequences are amplified via PCR: one non-coding sequence (fragment 1) is amplified with a HindIII site at the 5′ end and an Xba site at the 3′end; the other non-coding sequence (fragment 2) is amplified with a BamHI site at the 5′end and a HindIII site at the 3′end. The CMV promoter and the fragments (1 and 2) are digested with the appropriate enzymes (CMV promoter—XbaI and BamHI; fragment 1—XbaI; fragment 2—BamHI) and ligated together. The resulting ligation product is digested with HindIII, and ligated with the HindIII-digested pUC 18 plasmid.

[1081] Plasmid DNA is added to a sterile cuvette with a 0.4 cm electrode gap (Bio-Rad). The final DNA concentration is generally at least 120 μg/ml. 0.5 ml of the cell suspension (containing approximately 1.5×10⁶ cells) is then added to the cuvette, and the cell suspension and DNA solutions are gently mixed. Electroporation is performed with a Gene-Pulser apparatus (Bio-Rad). Capacitance and voltage are set at 960 μF and 250-300 V, respectively. As voltage increases, cell survival decreases, but the percentage of surviving cells that stably incorporate the introduced DNA into their genome increases dramatically. Given these parameters, a pulse time of approximately 14-20 mSec should be observed.

[1082] Electroporated cells are maintained at room temperature for approximately 5 min, and the contents of the cuvette are then gently removed with a sterile transfer pipette. The cells are added directly to 10 ml of prewarmed nutrient media (DMEM with 15% calf serum) in a 10 cm dish and incubated at 37 degree C. The following day, the media is aspirated and replaced with 10 ml of fresh media and incubated for a further 16-24 hours.

[1083] The engineered fibroblasts are then injected into the host, either alone or after having been grown to confluence on cytodex 3 microcarrier beads. The fibroblasts now produce the protein product. The fibroblasts can then be introduced into a patient as described above.

### Example 18

### Method of Treatment Using Gene Therapy—In Vivo

[1084] Another aspect of the present invention is using in vivo gene therapy methods to treat disorders, diseases and conditions. The gene therapy method relates to the introduction of naked nucleic acid (DNA, RNA, and antisense DNA or RNA) sequences into an animal to increase or decrease the expression of the polypeptide. The polynucleotide of the present invention may be operatively linked to (i.e., associated with) a promoter or any other genetic elements necessary for the expression of the polypeptide by the target tissue. Such gene therapy and delivery techniques and methods are known in the art, see, for example, WO90/11092, WO98/11779; U.S. Pat. Nos. 5,693,622, 5,705,151, 5,580,859; Tabata et al., Cardiovasc. Res. 35(3):470-479 (1997); Chao et al., Pharmacol. Res. 35(6):517-522 (1997); Wolff, Neuromuscul. Disord. 7(5):314-318 (1997); Schwartz et al., Gene Ther. 3(5):405-411 (1996); Tsurumi et al., Circulation 94(12):3281-3290 (1996) (incorporated herein by reference).

[1085] The polynucleotide constructs may be delivered by any method that delivers injectable materials to the cells of an animal, such as, injection into the interstitial space of tissues (heart, muscle, skin, lung, liver, intestine and the like). The polynucleotide constructs can be delivered in a pharmaceutically acceptable liquid or aqueous carrier.

[1086] The term “naked” polynucleotide, DNA or RNA, refers to sequences that are free from any delivery vehicle that acts to assist, promote, or facilitate entry into the cell, including viral sequences, viral particles, liposome formulations, lipofectin or precipitating agents and the like. However, the polynucleotides of the present invention may also be delivered in liposome formulations (such as those taught in Felgner P. L. et al. (1995) Ann. NY Acad. Sci. 772:126-139 and Abdallah B. et al. (1995) Biol. Cell 85(1):1-7) which can be prepared by methods well known to those skilled in the art.

[1087] The polynucleotide vector constructs used in the gene therapy method are preferably constructs that will not integrate into the host genome nor will they contain sequences that allow for replication. Any strong promoter known to those skilled in the art can be used for driving the expression of DNA. Unlike other gene therapy techniques, one major advantage of introducing naked nucleic acid sequences into target cells is the transitory nature of the polynucleotide synthesis in the cells. Studies have shown that non-replicating DNA sequences can be introduced into cells to provide production of the desired polypeptide for periods of up to six months.

[1088] The polynucleotide construct can be delivered to the interstitial space of tissues within an animal, including muscle, skin, brain, lung, liver, spleen, bone marrow, thymus, heart, lymph, blood, bone, cartilage, pancreas, kidney, gall bladder, stomach, intestine, testis, ovary, uterus, rectum, nervous system, eye, gland, and connective tissue. Interstitial space of the tissues comprises the intercellular fluid, mucopolysaccharide matrix among the reticular fibers of organ tissues, elastic fibers in the walls of vessels or chambers, collagen fibers of fibrous tissues, or that same matrix within connective tissue ensheathing muscle cells or in the lacunae of bone. It is similarly the space occupied by the plasma of the circulation and the lymph fluid of the lymphatic channels. Delivery to the interstitial space of muscle tissue is preferred for the reasons discussed below. They may be conveniently delivered by injection into the tissues comprising these cells. They are preferably delivered to and expressed in persistent, non-dividing cells which are differentiated, although delivery and expression may be achieved in non-differentiated or less completely differentiated cells, such as, for example, stem cells of blood or skin fibroblasts. In vivo muscle cells are particularly competent in their ability to take up and express polynucleotides.

[1089] For the naked polynucleotide injection, an effective dosage amount of DNA or RNA will be in the range of from about 0.05 g/kg body weight to about 50 mg/kg body weight. Preferably the dosage will be from about 0.005 mg/kg to about 20 mg/kg and more preferably from about 0.05 mg/kg to about 5 mg/kg. Of course, as the artisan of ordinary skill will appreciate, this dosage will vary according to the tissue site of injection. The appropriate and effective dosage of nucleic acid sequence can readily be determined by those of ordinary skill in the art and may depend on the condition being treated and the route of administration. The preferred route of administration is by the parenteral route of injection into the interstitial space of tissues. However, other parenteral routes may also be used, such as, inhalation of an aerosol formulation particularly for delivery to lungs or bronchial tissues, throat or mucous membranes of the nose. In addition, naked polynucleotide constructs can be delivered to arteries during angioplasty by the catheter used in the procedure.

[1090] The dose response effects of injected polynucleotide in muscle in vivo is determined as follows. Suitable template DNA for production of mRNA coding for polypeptide of the present invention is prepared in accordance with a standard recombinant DNA methodology. The template DNA, which may be either circular or linear, is either used as naked DNA or complexed with liposomes. The quadriceps muscles of mice are then injected with various amounts of the template DNA.

[1091] Five to six week old female and male Balb/C mice are anesthetized by intraperitoneal injection with 0.3 ml of 2.5% Avertin. A 1.5 cm incision is made on the anterior thigh, and the quadriceps muscle is directly visualized. The template DNA is injected in 0.1 ml of carrier in a 1 cc syringe through a 27 gauge needle over one minute, approximately 0.5 cm from the distal insertion site of the muscle into the knee and about 0.2 cm deep. A suture is placed over the injection site for future localization, and the skin is closed with stainless steel clips.

[1092] After an appropriate incubation time (e.g., 7 days) muscle extracts are prepared by excising the entire quadriceps. Every fifth 15 um cross-section of the individual quadriceps muscles is histochemically stained for protein expression. A time course for protein expression may be done in a similar fashion except that quadriceps from different mice are harvested at different times. Persistence of DNA in muscle following injection may be determined by Southern blot analysis after preparing total cellular DNA and HIRT supernatants from injected and control mice. The results of the above experimentation in mice can be used to extrapolate proper dosages and other treatment parameters in humans and other animals using naked DNA.

### Example 19

### Transgenic Animals

[1093] The polypeptides of the invention can also be expressed in transgenic animals. Animals of any species, including, but not limited to, mice, rats, rabbits, hamsters, guinea pigs, pigs, micro-pigs, goats, sheep, cows and non-human primates, e.g., baboons, monkeys, and chimpanzees may be used to generate transgenic animals. In a specific embodiment, techniques described herein or otherwise known in the art, are used to express polypeptides of the invention in humans, as part of a gene therapy protocol.

[1094] Any technique known in the art may be used to introduce the transgene (i.e., polynucleotides of the invention) into animals to produce the founder lines of transgenic animals. Such techniques include, but are not limited to, pronuclear microinjection (Paterson et al., Appl. Microbiol. Biotechnol. 40:691-698 (1994); Carver et al., Biotechnology (NY) 11:1263-1270 (1993); Wright et al., Biotechnology (NY) 9:830-834 (1991); and Hoppe et al., U.S. Pat. No. 4,873,191 (1989)); retrovirus mediated gene transfer into germ lines (Van der Putten et al., Proc. Natl. Acad. Sci., USA 82:6148-6152 (1985)), blastocysts or embryos; gene targeting in embryonic stem cells (Thompson et al., Cell 56:313-321 (1989)); electroporation of cells or embryos (Lo, 1983, Mol Cell. Biol. 3:1803-1814 (1983)); introduction of the polynucleotides of the invention using a gene gun (see, e.g., Ulmer et al., Science 259:1745 (1993); introducing nucleic acid constructs into embryonic pleuripotent stem cells and transferring the stem cells back into the blastocyst; and sperm-mediated gene transfer (Lavitrano et al., Cell 57:717-723 (1989); etc. For a review of such techniques, see Gordon, “Transgenic Animals,” Intl. Rev. Cytol. 115:171-229 (1989), which is incorporated by reference herein in its entirety.

[1095] Any technique known in the art may be used to produce transgenic clones containing polynucleotides of the invention, for example, nuclear transfer into enucleated oocytes of nuclei from cultured embryonic, fetal, or adult cells induced to quiescence (Campell et al., Nature 380:64-66 (1996); Wilmut et al., Nature 385:810-813 (1997)).

[1096] The present invention provides for transgenic animals that carry the transgene in all their cells, as well as animals which carry the transgene in some, but not all their cells, i.e., mosaic animals or chimeric. The transgene may be integrated as a single transgene or as multiple copies such as in concatamers, e.g., head-to-head tandems or head-to-tail tandems. The transgene may also be selectively introduced into and activated in a particular cell type by following, for example, the teaching of Lasko et al. (Lasko et al., Proc. Natl. Acad. Sci. USA 89:6232-6236 (1992)). The regulatory sequences required for such a cell-type specific activation will depend upon the particular cell type of interest, and will be apparent to those of skill in the art. When it is desired that the polynucleotide transgene be integrated into the chromosomal site of the endogenous gene, gene targeting is preferred. Briefly, when such a technique is to be utilized, vectors containing some nucleotide sequences homologous to the endogenous gene are designed for the purpose of integrating, via homologous recombination with chromosomal sequences, into and disrupting the function of the nucleotide sequence of the endogenous gene. The transgene may also be selectively introduced into a particular cell type, thus inactivating the endogenous gene in only that cell type, by following, for example, the teaching of Gu et al. (Gu et al., Science 265:103-106 (1994)). The regulatory sequences required for such a cell-type specific inactivation will depend upon the particular cell type of interest, and will be apparent to those of skill in the art.

[1097] Once transgenic animals have been generated, the expression of the recombinant gene may be assayed utilizing standard techniques. Initial screening may be accomplished by Southern blot analysis or PCR techniques to analyze animal tissues to verify that integration of the transgene has taken place. The level of mRNA expression of the transgene in the tissues of the transgenic animals may also be assessed using techniques which include, but are not limited to, Northern blot analysis of tissue samples obtained from the animal, in situ hybridization analysis, and reverse transcriptase-PCR (rt-PCR). Samples of transgenic gene-expressing tissue may also be evaluated immunocytochemically or immunohistochemically using antibodies specific for the transgene product.

[1098] Once the founder animals are produced, they may be bred, inbred, outbred, or crossbred to produce colonies of the particular animal. Examples of such breeding strategies include, but are not limited to: outbreeding of founder animals with more than one integration site in order to establish separate lines; inbreeding of separate lines in order to produce compound transgenics that express the transgene at higher levels because of the effects of additive expression of each transgene; crossing of heterozygous transgenic animals to produce animals homozygous for a given integration site in order to both augment expression and eliminate the need for screening of animals by DNA analysis; crossing of separate homozygous lines to produce compound heterozygous or homozygous lines; and breeding to place the transgene on a distinct background that is appropriate for an experimental model of interest.

[1099] Transgenic animals of the invention have uses which include, but are not limited to, animal model systems useful in elaborating the biological function of polypeptides of the present invention, studying conditions and/or disorders associated with aberrant expression, and in screening for compounds effective in ameliorating such conditions and/or disorders.

### Example 20

### Knock-Out Animals

[1100] Endogenous gene expression can also be reduced by inactivating or “knocking out” the gene and/or its promoter using targeted homologous recombination. (See e.g., Smithies et al., Nature 317:230-234 (1985); Thomas & Capecchi, Cell 51:503-512 (1987); Thompson et al., Cell 5:313-321 (1989); each of which is incorporated by reference herein in its entirety.) For example, a mutant, non-functional polynucleotide of the invention (or a completely unrelated DNA sequence) flanked by DNA homologous to the endogenous polynucleotide sequence (either the coding regions or regulatory regions of the gene) can be used, with or without a selectable marker and/or a negative selectable marker, to transfect cells that express polypeptides of the invention in vivo. In another embodiment, techniques known in the art are used to generate knockouts in cells that contain, but do not express the gene of interest. Insertion of the DNA construct, via targeted homologous recombination, results in inactivation of the targeted gene. Such approaches are particularly suited in research and agricultural fields where modifications to embryonic stem cells can be used to generate animal offspring with an inactive targeted gene (e.g., see Thomas & Capecchi 1987 and Thompson 1989, supra). However this approach can be routinely adapted for use in humans provided the recombinant DNA constructs are directly administered or targeted to the required site in vivo using appropriate viral vectors that will be apparent to those of skill in the art.

[1101] In further embodiments of the invention, cells that are genetically engineered to express the polypeptides of the invention, or alternatively, that are genetically engineered not to express the polypeptides of the invention (e.g., knockouts) are administered to a patient in vivo. Such cells may be obtained from the patient (i.e., animal, including human) or an MHC compatible donor and can include, but are not limited to fibroblasts, bone marrow cells, blood cells (e.g., lymphocytes), adipocytes, muscle cells, endothelial cells etc. The cells are genetically engineered in vitro using recombinant DNA techniques to introduce the coding sequence of polypeptides of the invention into the cells, or alternatively, to disrupt the coding sequence and/or endogenous regulatory sequence associated with the polypeptides of the invention, e.g., by transduction (using viral vectors, and preferably vectors that integrate the transgene into the cell genome) or transfection procedures, including, but not limited to, the use of plasmids, cosmids, YACs, naked DNA, electroporation, liposomes, etc. The coding sequence of the polypeptides of the invention can be placed under the control of a strong constitutive or inducible promoter or promoter/enhancer to achieve expression, and preferably secretion, of the polypeptides of the invention. The engineered cells which express and preferably secrete the polypeptides of the invention can be introduced into the patient systemically, e.g., in the circulation, or intraperitoneally.

[1102] Alternatively, the cells can be incorporated into a matrix and implanted in the body, e.g., genetically engineered fibroblasts can be implanted as part of a skin graft; genetically engineered endothelial cells can be implanted as part of a lymphatic or vascular graft. (See, for example, Anderson et al. U.S. Pat. No. 5,399,349; and Mulligan & Wilson, U.S. Pat. No. 5,460,959 each of which is incorporated by reference herein in its entirety).

[1103] When the cells to be administered are non-autologous or non-MHC compatible cells, they can be administered using well known techniques which prevent the development of a host immune response against the introduced cells. For example, the cells may be introduced in an encapsulated form which, while allowing for an exchange of components with the immediate extracellular environment, does not allow the introduced cells to be recognized by the host immune system.

[1104] Transgenic and “knock-out” animals of the invention have uses which include, but are not limited to, animal model systems useful in elaborating the biological function of polypeptides of the present invention, studying conditions and/or disorders associated with aberrant expression, and in screening for compounds effective in ameliorating such conditions and/or disorders.

### Example 21

### Assays Detecting Stimulation or Inhibition of B cell Proliferation and Differentiation

[1105] Generation of functional humoral immune responses requires both soluble and cognate signaling between B-lineage cells and their microenvironment. Signals may impart a positive stimulus that allows a B-lineage cell to continue its programmed development, or a negative stimulus that instructs the cell to arrest its current developmental pathway. To date, numerous stimulatory and inhibitory signals have been found to influence B cell responsiveness including IL-2, IL-4, IL-5, IL-6, IL-7, IL10, IL-13, IL-14 and IL-15. Interestingly, these signals are by themselves weak effectors but can, in combination with various co-stimulatory proteins, induce activation, proliferation, differentiation, homing, tolerance and death among B cell populations.

[1106] One of the best studied classes of B-cell co-stimulatory proteins is the TNF-superfamily. Within this family CD40, CD27, and CD30 along with their respective ligands CD154, CD70, and CD153 have been found to regulate a variety of immune responses. Assays which allow for the detection and/or observation of the proliferation and differentiation of these B-cell populations and their precursors are valuable tools in determining the effects various proteins may have on these B-cell populations in terms of proliferation and differentiation. Listed below are two assays designed to allow for the detection of the differentiation, proliferation, or inhibition of B-cell populations and their precursors.

[1107] In vitro Assay—Agonists or antagonists of the invention can be assessed for its ability to induce activation, proliferation, differentiation or inhibition and/or death in B-cell populations and their precursors. The activity of the agonists or antagonists of the invention on purified human tonsillar B cells, measured qualitatively over the dose range from 0.1 to 10,000 ng/mL, is assessed in a standard B-lymphocyte co-stimulation assay in which purified tonsillar B cells are cultured in the presence of either formalin-fixed Staphylococcus aureus Cowan I (SAC) or immobilized anti-human IgM antibody as the priming agent. Second signals such as IL-2 and IL-15 synergize with SAC and IgM crosslinking to elicit B cell proliferation as measured by tritiated-thymidine incorporation. Novel synergizing agents can be readily identified using this assay. The assay involves isolating human tonsillar B cells by magnetic bead (MACS) depletion of CD3-positive cells. The resulting cell population is greater than 95% B cells as assessed by expression of CD45R(B220).

[1108] Various dilutions of each sample are placed into individual wells of a 96-well plate to which are added 10⁵ B-cells suspended in culture medium (RPMI 1640 containing 10% FBS, 5×10⁻⁵M 2ME, 100U/ml penicillin, 10 ug/ml streptomycin, and 10⁻⁵ dilution of SAC) in a total volume of 150 ul. Proliferation or inhibition is quantitated by a 20 h pulse (1 uCi/well) with 3H-thymidine (6.7 Ci/mM) beginning 72 h post factor addition. The positive and negative controls are IL2 and medium respectively.

[1109] In vivo Assay—BALB/c mice are injected (i.p.) twice per day with buffer only, or 2 mg/Kg of agonists or antagonists of the invention, or truncated forms thereof. Mice receive this treatment for 4 consecutive days, at which time they are sacrificed and various tissues and serum collected for analyses. Comparison of H&E sections from normal spleens and spleens treated with agonists or antagonists of the invention identify the results of the activity of the agonists or antagonists on spleen cells, such as the diffusion of peri-arterial lymphatic sheaths, and/or significant increases in the nucleated cellularity of the red pulp regions, which may indicate the activation of the differentiation and proliferation of B-cell populations. Immunohistochemical studies using a B cell marker, anti-CD45R(B220), are used to determine whether any physiological changes to splenic cells, such as splenic disorganization, are due to increased B-cell representation within loosely defined B-cell zones that infiltrate established T-cell regions.

[1110] Flow cytometric analyses of the spleens from mice treated with agonist or antagonist is used to indicate whether the agonists or antagonists specifically increases the proportion of ThB+, CD45R(B220)dull B cells over that which is observed in control mice.

[1111] Likewise, a predicted consequence of increased mature B-cell representation in vivo is a relative increase in serum Ig titers. Accordingly, serum IgM and IgA levels are compared between buffer and agonists or antagonists-treated mice.

[1112] The studies described in this example tested activity of agonists or antagonists of the invention. However, one skilled in the art could easily modify the exemplified studies to test the activity of polynucleotides or polypeptides of the invention (e.g., gene therapy).

### Example 22

### T Cell Proliferation Assay

[1113] A CD3-induced proliferation assay is performed on PBMCs and is measured by the uptake of ³H-thymidine. The assay is performed as follows. Ninety-six well plates are coated with 100 μl/well of mAb to CD3 (HIT3a, Pharmingen) or isotype-matched control mAb (B33.1) overnight at 4 degrees C. (1 μg/ml in 0.05M bicarbonate buffer, pH 9.5), then washed three times with PBS. PBMC are isolated by F/H gradient centrifugation from human peripheral blood and added to quadruplicate wells (5×10⁴/well) of mAb coated plates in RPMI containing 10% FCS and P/S in the presence of varying concentrations of agonists or antagonists of the invention (total volume 200 ul). Relevant protein buffer and medium alone are controls. After 48 hr. culture at 37 degrees C., plates are spun for 2 min. at 1000 rpm and 100 μl of supernatant is removed and stored −20 degrees C. for measurement of IL-2 (or other cytokines) if effect on proliferation is observed. Wells are supplemented with 100 ul of medium containing 0.5 uCi of ³H-thymidine and cultured at 37 degrees C. for 18-24 hr. Wells are harvested and incorporation of ³H-thymidine used as a measure of proliferation. Anti-CD3 alone is the positive control for proliferation. IL-2 (100 U/ml) is also used as a control which enhances proliferation. Control antibody which does not induce proliferation of T cells is used as the negative control for the effects of agonists or antagonists of the invention.

[1114] The studies described in this example tested activity of agonists or antagonists of the invention. However, one skilled in the art could easily modify the exemplified studies to test the activity of polynucleotides or polypeptides of the invention (e.g., gene therapy).

### Example 23

### Effect of Agonists or Antagonists of the Invention on the Expression of MHC Class II, Costimulatory and Adhesion Molecules and Cell Differentiation of Monocytes and Monocyte-Derived Human Dendritic Cells

[1115] Dendritic cells are generated by the expansion of proliferating precursors found in the peripheral blood: adherent PBMC or elutriated monocytic fractions are cultured for 7-10 days with GM-CSF (50 ng/ml) and IL-4 (20 ng/ml). These dendritic cells have the characteristic phenotype of immature cells (expression of CD1, CD80, CD86, CD40 and MHC class II antigens). Treatment with activating factors, such as TNF-α, causes a rapid change in surface phenotype (increased expression of MHC class I and II, costimulatory and adhesion molecules, downregulation of FCγRII, upregulation of CD83). These changes correlate with increased antigen-presenting capacity and with functional maturation of the dendritic cells.

[1116] FACS analysis of surface antigens is performed as follows. Cells are treated 1-3 days with increasing concentrations of agonist or antagonist of the invention or LPS (positive control), washed with PBS containing 1% BSA and 0.02 mM sodium azide, and then incubated with 1:20 dilution of appropriate FITC- or PE-labeled monoclonal antibodies for 30 minutes at 4 degrees C. After an additional wash, the labeled cells are analyzed by flow cytometry on a FACScan (Becton Dickinson).

[1117] Effect on the production of cytokines. Cytokines generated by dendritic cells, in particular IL-12, are important in the initiation of T-cell dependent immune responses. IL-12 strongly influences the development of Th1 helper T-cell immune response, and induces cytotoxic T and NK cell function. An ELISA is used to measure the IL-12 release as follows. Dendritic cells (10⁶/ml) are treated with increasing concentrations of agonists or antagonists of the invention for 24 hours. LPS (100 ng/ml) is added to the cell culture as positive control. Supernatants from the cell cultures are then collected and analyzed for IL-12 content using commercial ELISA kit (e.g., R & D Systems (Minneapolis, Minn.)). The standard protocols provided with the kits are used.

[1118] Effect on the expression of MHC Class II costimulatory and adhesion molecules. Three major families of cell surface antigens can be identified on monocytes: adhesion molecules, molecules involved in antigen presentation, and Fc receptor. Modulation of the expression of MHC class II antigens and other costimulatory molecules, such as B7 and ICAM-1, may result in changes in the antigen presenting capacity of monocytes and ability to induce T cell activation. Increased expression of Fc receptors may correlate with improved monocyte cytotoxic activity, cytokine release and phagocytosis.

[1119] FACS analysis is used to examine the surface antigens as follows. Monocytes are treated 1-5 days with increasing concentrations of agonists or antagonists of the invention or LPS (positive control), washed with PBS containing 1% BSA and 0.02 mM sodium azide, and then incubated with 1:20 dilution of appropriate FITC- or PE-labeled monoclonal antibodies for 30 minutes at 4 degrees C. After an additional wash, the labeled cells are analyzed by flow cytometry on a FACScan (Becton Dickinson).

[1120] Monocyte activation and/or increased survival. Assays for molecules that activate (or alternatively, inactivate) monocytes and/or increase monocyte survival (or alternatively, decrease monocyte survival) are known in the art and may routinely be applied to determine whether a molecule of the invention functions as an inhibitor or activator of monocytes. Agonists or antagonists of the invention can be screened using the three assays described below. For each of these assays, Peripheral blood mononuclear cells (PBMC) are purified from single donor leukopacks (American Red Cross, Baltimore, Md.) by centrifugation through a Histopaque gradient (Sigma). Monocytes are isolated from PBMC by counterflow centrifugal elutriation.

[1121] Monocyte Survival Assay. Human peripheral blood monocytes progressively lose viability when cultured in absence of serum or other stimuli. Their death results from internally regulated processes (apoptosis). Addition to the culture of activating factors, such as TNF-alpha dramatically improves cell survival and prevents DNA fragmentation. Propidium iodide (PI) staining is used to measure apoptosis as follows. Monocytes are cultured for 48 hours in polypropylene tubes in serum-free medium (positive control), in the presence of 100 ng/ml TNF-alpha (negative control), and in the presence of varying concentrations of the compound to be tested. Cells are suspended at a concentration of 2×10⁶/ml in PBS containing PI at a final concentration of 5 μg/ml, and then incubated at room temperature for 5 minutes before FACScan analysis. PI uptake has been demonstrated to correlate with DNA fragmentation in this experimental paradigm.

[1122] Effect on cytokine release. An important function of monocytes/macrophages is their regulatory activity on other cellular populations of the immune system through the release of cytokines after stimulation. An ELISA to measure cytokine release is performed as follows. Human monocytes are incubated at a density of 5×10⁵ cells/ml with increasing concentrations of agonists or antagonists of the invention and under the same conditions, but in the absence of agonists or antagonists. For IL-12 production, the cells are primed overnight with IFN (100 U/ml) in the presence of agonist or antagonist of the invention. LPS (10 ng/ml) is then added. Conditioned media are collected after 24h and kept frozen until use. Measurement of TNF-alpha, IL-10, MCP-1 and IL-8 is then performed using a commercially available ELISA kit (e.g., R & D Systems (Minneapolis, Minn.)) and applying the standard protocols provided with the kit.

[1123] Oxidative burst. Purified monocytes are plated in 96-w plate at 2-1×10⁵ cell/well. Increasing concentrations of agonists or antagonists of the invention are added to the wells in a total volume of 0.2 ml culture medium (RPMI 1640+10% FCS, glutamine and antibiotics). After 3 days incubation, the plates are centrifuged and the medium is removed from the wells. To the macrophage monolayers, 0.2 ml per well of phenol red solution (140 mM NaCl, 10 mM potassium phosphate buffer pH 7.0, 5.5 mM dextrose, 0.56 mM phenol red and 19 U/ml of HRPO) is added, together with the stimulant (200 nM PMA). The plates are incubated at 37° C. for 2 hours and the reaction is stopped by adding 20 μl 1N NaOH per well. The absorbance is read at 610 nm. To calculate the amount of H₂O₂ produced by the macrophages, a standard curve of a H₂O₂ solution of known molarity is performed for each experiment.

[1124] The studies described in this example tested activity of agonists or antagonists of the invention. However, one skilled in the art could easily modify the exemplified studies to test the activity of polynucleotides or polypeptides of the invention (e.g., gene therapy).

### Example 24

### Biological Effects of Agonists or Antagonists of the Invention Astrocyte and Neuronal Assays

[1125] Agonists or antagonists of the invention, expressed in Escherichia coli and purified as described above, can be tested for activity in promoting the survival, neurite outgrowth, or phenotypic differentiation of cortical neuronal cells and for inducing the proliferation of glial fibrillary acidic protein immunopositive cells, astrocytes. The selection of cortical cells for the bioassay is based on the prevalent expression of FGF-1 and FGF-2 in cortical structures and on the previously reported enhancement of cortical neuronal survival resulting from FGF-2 treatment. A thymidine incorporation assay, for example, can be used to elucidate an agonist or antagonist of the invention's activity on these cells.

[1126] Moreover, previous reports describing the biological effects of FGF-2 (basic FGF) on cortical or hippocampal neurons in vitro have demonstrated increases in both neuron survival and neurite outgrowth (Walicke et al., “Fibroblast growth factor promotes survival of dissociated hippocampal neurons and enhances neurite extension.” Proc. Natl. Acad. Sci. USA 83:3012-3016. (1986), assay herein incorporated by reference in its entirety). However, reports from experiments done on PC-12 cells suggest that these two responses are not necessarily synonymous and may depend on not only which FGF is being tested but also on which receptor(s) are expressed on the target cells. Using the primary cortical neuronal culture paradigm, the ability of an agonist or antagonist of the invention to induce neurite outgrowth can be compared to the response achieved with FGF-2 using, for example, a thymidine incorporation assay.

[1127] Fibroblast and Endothelial Cell Assays

[1128] Human lung fibroblasts are obtained from Clonetics (San Diego, Calif.) and maintained in growth media from Clonetics. Dermal microvascular endothelial cells are obtained from Cell Applications (San Diego, Calif.). For proliferation assays, the human lung fibroblasts and dermal microvascular endothelial cells can be cultured at 5,000 cells/well in a 96-well plate for one day in growth medium. The cells are then incubated for one day in 0.1% BSA basal medium. After replacing the medium with fresh 0.1% BSA medium, the cells are incubated with the test proteins for 3 days. Alamar Blue (Alamar Biosciences, Sacramento, Calif.) is added to each well to a final concentration of 10%. The cells are incubated for 4 hr. Cell viability is measured by reading in a CytoFluor fluorescence reader. For the PGE₂ assays, the human lung fibroblasts are cultured at 5,000 cells/well in a 96-well plate for one day. After a medium change to 0.1% BSA basal medium, the cells are incubated with FGF-2 or agonists or antagonists of the invention with or without IL-1α for 24 hours. The supernatants are collected and assayed for PGE₂ by EIA kit (Cayman, Ann Arbor, Mich.). For the IL-6 assays, the human lung fibroblasts are cultured at 5,000 cells/well in a 96-well plate for one day. After a medium change to 0.1% BSA basal medium, the cells are incubated with FGF-2 or with or without agonists or antagonists of the invention IL-1α for 24 hours. The supernatants are collected and assayed for IL-6 by ELISA kit (Endogen, Cambridge, Mass.).

[1129] Human lung fibroblasts are cultured with FGF-2 or agonists or antagonists of the invention for 3 days in basal medium before the addition of Alamar Blue to assess effects on growth of the fibroblasts. FGF-2 should show a stimulation at 10 -2500 ng/ml which can be used to compare stimulation with agonists or antagonists of the invention.

[1130] Parkinson Models.

[1131] The loss of motor function in Parkinson's disease is attributed to a deficiency of striatal dopamine resulting from the degeneration of the nigrostriatal dopaminergic projection neurons. An animal model for Parkinson's that has been extensively characterized involves the systemic administration of 1-methyl-4 phenyl 1,2,3,6-tetrahydropyridine (MPTP). In the CNS, MPTP is taken-up by astrocytes and catabolized by monoamine oxidase B to 1-methyl-4-phenyl pyridine (MPP⁺) and released. Subsequently, MPP⁺ is actively accumulated in dopaminergic neurons by the high-affinity reuptake transporter for dopamine. MPP⁺ is then concentrated in mitochondria by the electrochemical gradient and selectively inhibits nicotidamide adenine disphosphate: ubiquinone oxidoreductionase (complex I), thereby interfering with electron transport and eventually generating oxygen radicals.

[1132] It has been demonstrated in tissue culture paradigms that FGF-2 (basic FGF) has trophic activity towards nigral dopaminergic neurons (Ferrari et al., Dev. Biol. 1989). Recently, Dr. Unsicker's group has demonstrated that administering FGF-2 in gel foam implants in the striatum results in the near complete protection of nigral dopaminergic neurons from the toxicity associated with MPTP exposure (Otto and Unsicker, J. Neuroscience, 1990).

[1133] Based on the data with FGF-2, agonists or antagonists of the invention can be evaluated to determine whether it has an action similar to that of FGF-2 in enhancing dopaminergic neuronal survival in vitro and it can also be tested in vivo for protection of dopaminergic neurons in the striatum from the damage associated with MPTP treatment. The potential effect of an agonist or antagonist of the invention is first examined in vitro in a dopaminergic neuronal cell culture paradigm. The cultures are prepared by dissecting the midbrain floor plate from gestation day 14 Wistar rat embryos. The tissue is dissociated with trypsin and seeded at a density of 200,000 cells/cm² on polyorthinine-laminin coated glass coverslips. The cells are maintained in Dulbecco's Modified Eagle's medium and F12 medium containing hormonal supplements (N1). The cultures are fixed with paraformaldehyde after 8 days in vitro and are processed for tyrosine hydroxylase, a specific marker for dopaminergic neurons, immunohistochemical staining. Dissociated cell cultures are prepared from embryonic rats. The culture medium is changed every third day and the factors are also added at that time.

[1134] Since the dopaminergic neurons are isolated from animals at gestation day 14, a developmental time which is past the stage when the dopaminergic precursor cells are proliferating, an increase in the number of tyrosine hydroxylase immunopositive neurons would represent an increase in the number of dopaminergic neurons surviving in vitro. Therefore, if an agonist or antagonist of the invention acts to prolong the survival of dopaminergic neurons, it would suggest that the agonist or antagonist may be involved in Parkinson's Disease.

[1135] The studies described in this example tested activity of agonists or antagonists of the invention. However, one skilled in the art could easily modify the exemplified studies to test the activity of polynucleotides or polypeptides of the invention (e.g., gene therapy).

### Example 25

### The Effect of Agonists or Antagonists of the Invention on the Growth of Vascular Endothelial Cells

[1136] On day 1, human umbilical vein endothelial cells (HUVEC) are seeded at 2-5×10⁴ cells/35 mm dish density in M199 medium containing 4% fetal bovine serum (FBS), 16 units/ml heparin, and 50 units/ml endothelial cell growth supplements (ECGS, Biotechnique, Inc.). On day 2, the medium is replaced with M199 containing 10% FBS, 8 units/ml heparin. An agonist or antagonist of the invention, and positive controls, such as VEGF and basic FGF (bFGF) are added, at varying concentrations. On days 4 and 6, the medium is replaced. On day 8, cell number is determined with a Coulter Counter.

[1137] An increase in the number of HUVEC cells indicates that the compound of the invention may proliferate vascular endothelial cells, while a decrease in the number of HUVEC cells indicates that the compound of the invention inhibits vascular endothelial cells.

[1138] The studies described in this example tested activity of a polypeptide of the invention. However, one skilled in the art could easily modify the exemplified studies to test the activity of polynucleotides (e.g., gene therapy), agonists, and/or antagonists of the invention.

### Example 26

### Rat Corneal Wound Healing Model

[1139] This animal model shows the effect of an agonist or antagonist of the invention on neovascularization. The experimental protocol includes:

[1140] Making a 1-1.5 mm long incision from the center of cornea into the stromal layer.

[1141] Inserting a spatula below the lip of the incision facing the outer corner of the eye.

[1142] Making a pocket (its base is 1-1.5 mm form the edge of the eye).

[1143] Positioning a pellet, containing 50 ng-5 ug of an agonist or antagonist of the invention, within the pocket.

[1144] Treatment with an agonist or antagonist of the invention can also be applied topically to the corneal wounds in a dosage range of 20 mg -500 mg (daily treatment for five days).

[1145] The studies described in this example tested activity of agonists or antagonists of the invention. However, one skilled in the art could easily modify the exemplified studies to test the activity of polynucleotides or polypeptides of the invention (e.g., gene therapy).

### Example 27

### Diabetic Mouse and Glucocorticoid-Impaired Wound Healing Models

[1146] Diabetic db+/db+Mouse Model.

[1147] To demonstrate that an agonist or antagonist of the invention accelerates the healing process, the genetically diabetic mouse model of wound healing is used. The full thickness wound healing model in the db+/db+ mouse is a well characterized, clinically relevant and reproducible model of impaired wound healing. Healing of the diabetic wound is dependent on formation of granulation tissue and re-epithelialization rather than contraction (Gartner, M. H. et al., J. Surg. Res. 52:389 (1992); Greenhalgh, D. G. et al., Am. J. Pathol. 136:1235 (1990)).

[1148] The diabetic animals have many of the characteristic features observed in Type II diabetes mellitus. Homozygous (db+/db+) mice are obese in comparison to their normal heterozygous (db+/+m) littermates. Mutant diabetic (db+/db+) mice have a single autosomal recessive mutation on chromosome 4 (db+) (Coleman et al. Proc. Natl. Acad. Sci. USA 77:283-293 (1982)). Animals show polyphagia, polydipsia and polyuria. Mutant diabetic mice (db+/db+) have elevated blood glucose, increased or normal insulin levels, and suppressed cell-mediated immunity (Mandel et al., J. Immunol. 120:1375 (1978); Debray-Sachs, M. et al., Clin. Exp. Immunol. 51(1):1-7 (1983); Leiter et al., Am. J. of Pathol. 114:46-55 (1985)). Peripheral neuropathy, myocardial complications, and microvascular lesions, basement membrane thickening and glomerular filtration abnormalities have been described in these animals (Norido, F. et al., Exp. Neurol. 83(2):221-232 (1984); Robertson et al., Diabetes 29(1):60-67 (1980); Giacomelli et al., Lab Invest. 40(4):460-473 (1979); Coleman, D. L., Diabetes 31 (Suppl): 1-6 (1982)). These homozygous diabetic mice develop hyperglycemia that is resistant to insulin analogous to human type II diabetes (Mandel et al., J. Immunol. 120:1375-1377 (1978)).

[1149] The characteristics observed in these animals suggests that healing in this model may be similar to the healing observed in human diabetes (Greenhalgh, et al., Am. J. of Pathol. 136:1235-1246 (1990)).

[1150] Genetically diabetic female C57BL/KsJ (db+/db+) mice and their non-diabetic (db+/+m) heterozygous littermates are used in this study (Jackson Laboratories). The animals are purchased at 6 weeks of age and are 8 weeks old at the beginning of the study. Animals are individually housed and received food and water ad libitum. All manipulations are performed using aseptic techniques. The experiments are conducted according to the rules and guidelines of Human Genome Sciences, Inc. Institutional Animal Care and Use Committee and the Guidelines for the Care and Use of Laboratory Animals.

[1151] Wounding protocol is performed according to previously reported methods (Tsuboi, R. and Rifkin, D. B., J. Exp. Med. 172:245-251 (1990)). Briefly, on the day of wounding, animals are anesthetized with an intraperitoneal injection of Avertin (0.01 mg/mL), 2,2,2-tribromoethanol and 2-methyl-2-butanol dissolved in deionized water. The dorsal region of the animal is shaved and the skin washed with 70% ethanol solution and iodine. The surgical area is dried with sterile gauze prior to wounding. An 8 mm full-thickness wound is then created using a Keyes tissue punch. Immediately following wounding, the surrounding skin is gently stretched to eliminate wound expansion. The wounds are left open for the duration of the experiment. Application of the treatment is given topically for 5 consecutive days commencing on the day of wounding. Prior to treatment, wounds are gently cleansed with sterile saline and gauze sponges.

[1152] Wounds are visually examined and photographed at a fixed distance at the day of surgery and at two day intervals thereafter. Wound closure is determined by daily measurement on days 1-5 and on day 8. Wounds are measured horizontally and vertically using a calibrated Jameson caliper. Wounds are considered healed if granulation tissue is no longer visible and the wound is covered by a continuous epithelium.

[1153] An agonist or antagonist of the invention is administered using at a range different doses, from 4 mg to 500 mg per wound per day for 8 days in vehicle. Vehicle control groups received 50 mL of vehicle solution.

[1154] Animals are euthanized on day 8 with an intraperitoneal injection of sodium pentobarbital (300 mg/kg). The wounds and surrounding skin are then harvested for histology and immunohistochemistry. Tissue specimens are placed in 10% neutral buffered formalin in tissue cassettes between biopsy sponges for further processing.

[1155] Three groups of 10 animals each (5 diabetic and 5 non-diabetic controls) are evaluated: 1) Vehicle placebo control, 2) untreated group, and 3) treated group.

[1156] Wound closure is analyzed by measuring the area in the vertical and horizontal axis and obtaining the total square area of the wound. Contraction is then estimated by establishing the differences between the initial wound area (day 0) and that of post treatment (day 8). The wound area on day 1 is 64 mm², the corresponding size of the dermal punch. Calculations are made using the following formula:

[Open area on day 8]−[Open area on day 1]/[Open area on day 1]

[1157] Specimens are fixed in 10% buffered formalin and paraffin embedded blocks are sectioned perpendicular to the wound surface (5 mm) and cut using a Reichert-Jung microtome. Routine hematoxylin-eosin (H&E) staining is performed on cross-sections of bisected wounds. Histologic examination of the wounds are used to assess whether the healing process and the morphologic appearance of the repaired skin is altered by treatment with an agonist or antagonist of the invention. This assessment included verification of the presence of cell accumulation, inflammatory cells, capillaries, fibroblasts, reepithelialization and epidermal maturity (Greenhalgh, D. G. et al., Am. J. Pathol. 136:1235 (1990)). A calibrated lens micrometer is used by a blinded observer.

[1158] Tissue sections are also stained immunohistochemically with a polyclonal rabbit anti-human keratin antibody using ABC Elite detection system. Human skin is used as a positive tissue control while non-immune IgG is used as a negative control. Keratinocyte growth is determined by evaluating the extent of reepithelialization of the wound using a calibrated lens micrometer.

[1159] Proliferating cell nuclear antigen/cyclin (PCNA) in skin specimens is demonstrated by using anti-PCNA antibody (1:50) with an ABC Elite detection system. Human colon cancer served as a positive tissue control and human brain tissue is used as a negative tissue control. Each specimen included a section with omission of the primary antibody and substitution with non-immune mouse IgG. Ranking of these sections is based on the extent of proliferation on a scale of 0-8, the lower side of the scale reflecting slight proliferation to the higher side reflecting intense proliferation.

[1160] Experimental data are analyzed using an unpaired t test. A p value of <0.05 is considered significant.

[1161] Steroid Impaired Rat Model

[1162] The inhibition of wound healing by steroids has been well documented in various in vitro and in vivo systems (Wahl, Glucocorticoids and Wound healing. In: Anti-Inflammatory Steroid Action: Basic and Clinical Aspects. 280-302 (1989); Wahlet al., J. Immunol. 115: 476-481 (1975); Werb et al., J. Exp. Med. 147:1684-1694 (1978)). Glucocorticoids retard wound healing by inhibiting angiogenesis, decreasing vascular permeability (Ebert et al., An. Intern. Med. 37:701-705 (1952)), fibroblast proliferation, and collagen synthesis (Beck et al., Growth Factors. 5: 295-304 (1991); Haynes et al., J. Clin. Invest. 61: 703-797 (1978)) and producing a transient reduction of circulating monocytes (Haynes et al., J. Clin. Invest. 61: 703-797 (1978); Wahl, “Glucocorticoids and wound healing”, In: Antiinflammatory Steroid Action: Basic and Clinical Aspects, Academic Press, New York, pp. 280-302 (1989)). The systemic administration of steroids to impaired wound healing is a well establish phenomenon in rats (Beck et al., Growth Factors. 5: 295-304 (1991); Haynes et al., J. Clin. Invest. 61. 703-797 (1978); Wahl, “Glucocorticoids and wound healing”, In: Antiinflammatory Steroid Action: Basic and Clinical Aspects, Academic Press, New York, pp. 280-302 (1989); Pierce et al., Proc. Natl. Acad. Sci. USA 86: 2229-2233 (1989)).

[1163] To demonstrate that an agonist or antagonist of the invention can accelerate the healing process, the effects of multiple topical applications of the agonist or antagonist on full thickness excisional skin wounds in rats in which healing has been impaired by the systemic administration of methylprednisolone is assessed.

[1164] Young adult male Sprague Dawley rats weighing 250-300 g (Charles River Laboratories) are used in this example. The animals are purchased at 8 weeks of age and are 9 weeks old at the beginning of the study. The healing response of rats is impaired by the systemic administration of methylprednisolone (17 mg/kg/rat intramuscularly) at the time of wounding. Animals are individually housed and received food and water ad libitum. All manipulations are performed using aseptic techniques. This study is conducted according to the rules and guidelines of Human Genome Sciences, Inc. Institutional Animal Care and Use Committee and the Guidelines for the Care and Use of Laboratory Animals.

[1165] The wounding protocol is followed according to section A, above. On the day of wounding, animals are anesthetized with an intramuscular injection of ketamine (50 mg/kg) and xylazine (5 mg/kg). The dorsal region of the animal is shaved and the skin washed with 70% ethanol and iodine solutions. The surgical area is dried with sterile gauze prior to wounding. An 8 mm full-thickness wound is created using a Keyes tissue punch. The wounds are left open for the duration of the experiment. Applications of the testing materials are given topically once a day for 7 consecutive days commencing on the day of wounding and subsequent to methylprednisolone administration. Prior to treatment, wounds are gently cleansed with sterile saline and gauze sponges.

[1166] Wounds are visually examined and photographed at a fixed distance at the day of wounding and at the end of treatment. Wound closure is determined by daily measurement on days 1-5 and on day 8. Wounds are measured horizontally and vertically using a calibrated Jameson caliper. Wounds are considered healed if granulation tissue is no longer visible and the wound is covered by a continuous epithelium.

[1167] The agonist or antagonist of the invention is administered using at a range different doses, from 4 mg to 500 mg per wound per day for 8 days in vehicle. Vehicle control groups received 50 mL of vehicle solution.

[1168] Animals are euthanized on day 8 with an intraperitoneal injection of sodium pentobarbital (300 mg/kg). The wounds and surrounding skin are then harvested for histology. Tissue specimens are placed in 10% neutral buffered formalin in tissue cassettes between biopsy sponges for further processing.

[1169] Three groups of 10 animals each (5 with methylprednisolone and 5 without glucocorticoid) are evaluated: 1) Untreated group 2) Vehicle placebo control 3) treated groups.

[1170] Wound closure is analyzed by measuring the area in the vertical and horizontal axis and obtaining the total area of the wound. Closure is then estimated by establishing the differences between the initial wound area (day 0) and that of post treatment (day 8). The wound area on day 1 is 64 mm², the corresponding size of the dermal punch. Calculations are made using the following formula:

[Open area on day 8]−[Open area on day 1]/[Open area on day 1]

[1171] Specimens are fixed in 10% buffered formalin and paraffin embedded blocks are sectioned perpendicular to the wound surface (5 mm) and cut using an Olympus microtome. Routine hematoxylin-eosin (H&E) staining is performed on cross-sections of bisected wounds. Histologic examination of the wounds allows assessment of whether the healing process and the morphologic appearance of the repaired skin is improved by treatment with an agonist or antagonist of the invention. A calibrated lens micrometer is used by a blinded observer to determine the distance of the wound gap.

[1172] Experimental data are analyzed using an unpaired t test. A p value of <0.05 is considered significant.

[1173] The studies described in this example tested activity of agonists or antagonists of the invention. However, one skilled in the art could easily modify the exemplified studies to test the activity of polynucleotides or polypeptides of the invention (e.g., gene therapy).

### Example 28

### Lymphadema Animal Model

[1174] The purpose of this experimental approach is to create an appropriate and consistent lymphedema model for testing the therapeutic effects of an agonist or antagonist of the invention in lymphangiogenesis and re-establishment of the lymphatic circulatory system in the rat hind limb. Effectiveness is measured by swelling volume of the affected limb, quantification of the amount of lymphatic vasculature, total blood plasma protein, and histopathology. Acute lymphedema is observed for 7-10 days. Perhaps more importantly, the chronic progress of the edema is followed for up to 3-4 weeks.

[1175] Prior to beginning surgery, blood sample is drawn for protein concentration analysis. Male rats weighing approximately ˜350 g are dosed with Pentobarbital. Subsequently, the right legs are shaved from knee to hip. The shaved area is swabbed with gauze soaked in 70% EtOH. Blood is drawn for serum total protein testing. Circumference and volumetric measurements are made prior to injecting dye into paws after marking 2 measurement levels (0.5 cm above heel, at mid-pt of dorsal paw). The intradermal dorsum of both right and left paws are injected with 0.05 ml of 1% Evan's Blue. Circumference and volumetric measurements are then made following injection of dye into paws.

[1176] Using the knee joint as a landmark, a mid-leg inguinal incision is made circumferentially allowing the femoral vessels to be located. Forceps and hemostats are used to dissect and separate the skin flaps. After locating the femoral vessels, the lymphatic vessel that runs along side and underneath the vessel(s) is located. The main lymphatic vessels in this area are then electrically coagulated or suture ligated.

[1177] Using a microscope, muscles in back of the leg (near the semitendinosis and adductors) are bluntly dissected. The popliteal lymph node is then located. The 2 proximal and 2 distal lymphatic vessels and distal blood supply of the popliteal node are then ligated by suturing. The popliteal lymph node, and any accompanying adipose tissue, is then removed by cutting connective tissues.

[1178] Care is taken to control any mild bleeding resulting from this procedure. After lymphatics are occluded, the skin flaps are sealed by using liquid skin (Vetbond) (A J Buck). The separated skin edges are sealed to the underlying muscle tissue while leaving a gap of 0.5 cm around the leg. Skin also may be anchored by suturing to underlying muscle when necessary.

[1179] To avoid infection, animals are housed individually with mesh (no bedding). Recovering animals are checked daily through the optimal edematous peak, which typically occurred by day 5-7. The plateau edematous peak are then observed. To evaluate the intensity of the lymphedema, the circumference and volumes of 2 designated places on each paw before operation and daily for 7 days are measured. The effect of plasma proteins on lymphedema is determined and whether protein analysis is a useful testing perimeter is also investigated. The weights of both control and edematous limbs are evaluated at 2 places. Analysis is performed in a blind manner.

[1180] Circumference Measurements: Under brief gas anesthetic to prevent limb movement, a cloth tape is used to measure limb circumference. Measurements are done at the ankle bone and dorsal paw by 2 different people and those 2 readings are averaged. Readings are taken from both control and edematous limbs.

[1181] Volumetric Measurements: On the day of surgery, animals are anesthetized with Pentobarbital and are tested prior to surgery. For daily volumetrics animals are under brief halothane anesthetic (rapid immobilization and quick recovery), and both legs are shaved and equally marked using waterproof marker on legs. Legs are first dipped in water, then dipped into instrument to each marked level, then measured by Buxco edema software(Chen/Victor). Data is recorded by one person, while the other is dipping the limb to marked area.

[1182] Blood-plasma protein measurements: Blood is drawn, spun, and serum separated prior to surgery and then at conclusion for total protein and Ca2⁺ comparison.

[1183] Limb Weight Comparison: After drawing blood, the animal is prepared for tissue collection. The limbs are amputated using a quillitine, then both experimental and control legs are cut at the ligature and weighed. A second weighing is done as the tibio-cacaneal joint is disarticulated and the foot is weighed.

[1184] Histological Preparations: The transverse muscle located behind the knee (popliteal) area is dissected and arranged in a metal mold, filled with freezeGel, dipped into cold methylbutane, placed into labeled sample bags at −80EC until sectioning. Upon sectioning, the muscle is observed under fluorescent microscopy for lymphatics.

[1185] The studies described in this example tested activity of agonists or antagonists of the invention. However, one skilled in the art could easily modify the exemplified studies to test the activity of polynucleotides or polypeptides of the invention (e.g., gene therapy).

### Example 29

### Suppression of TNF alpha-induced adhesion molecule expression by a Agonist or Antagonist of the Invention

[1186] The recruitment of lymphocytes to areas of inflammation and angiogenesis involves specific receptor-ligand interactions between cell surface adhesion molecules (CAMs) on lymphocytes and the vascular endothelium. The adhesion process, in both normal and pathological settings, follows a multi-step cascade that involves intercellular adhesion molecule-1 (ICAM-1), vascular cell adhesion molecule-1 (VCAM-1), and endothelial leukocyte adhesion molecule-1 (E-selectin) expression on endothelial cells (EC). The expression of these molecules and others on the vascular endothelium determines the efficiency with which leukocytes may adhere to the local vasculature and extravasate into the local tissue during the development of an inflammatory response. The local concentration of cytokines and growth factor participate in the modulation of the expression of these CAMs.

[1187] Tumor necrosis factor alpha (TNF-a), a potent proinflammatory cytokine, is a stimulator of all three CAMs on endothelial cells and may be involved in a wide variety of inflammatory responses, often resulting in a pathological outcome.

[1188] The potential of an agonist or antagonist of the invention to mediate a suppression of TNF-a induced CAM expression can be examined. A modified ELISA assay which uses ECs as a solid phase absorbent is employed to measure the amount of CAM expression on TNF-a treated ECs when co-stimulated with a member of the FGF family of proteins.

[1189] To perform the experiment, human umbilical vein endothelial cell (HUVEC) cultures are obtained from pooled cord harvests and maintained in growth medium (EGM-2; Clonetics, San Diego, Calif.) supplemented with 10% FCS and 1% penicillin/streptomycin in a 37 degree C. humidified incubator containing 5% CO₂. HUVECs are seeded in 96-well plates at concentrations of 1×10⁴ cells/well in EGM medium at 37 degree C. for 18-24 hrs or until confluent. The monolayers are subsequently washed 3 times with a serum-free solution of RPMI-1640 supplemented with 100 U/ml penicillin and 100 mg/ml streptomycin, and treated with a given cytokine and/or growth factor(s) for 24 h at 37 degree C. Following incubation, the cells are then evaluated for CAM expression.

[1190] Human Umbilical Vein Endothelial cells (HUVECs) are grown in a standard 96 well plate to confluence. Growth medium is removed from the cells and replaced with 90 ul of 199 Medium (10% FBS). Samples for testing and positive or negative controls are added to the plate in triplicate (in 10 ul volumes). Plates are incubated at 37 degree C. for either 5 h (selectin and integrin expression) or 24 h (integrin expression only). Plates are aspirated to remove medium and 100 μl of 0.1% paraformaldehyde-PBS(with Ca++ and Mg++) is added to each well. Plates are held at 4° C. for 30 min.

[1191] Fixative is then removed from the wells and wells are washed 1× with PBS(+Ca,Mg)+0.5% BSA and drained. Do not allow the wells to dry. Add 10 μl of diluted primary antibody to the test and control wells. Anti-ICAM-1-Biotin, Anti-VCAM-1-Biotin and Anti-E-selectin-Biotin are used at a concentration of 10 μg/ml (1:10 dilution of 0.1 mg/ml stock antibody). Cells are incubated at 37° C. for 30 min. in a humidified environment. Wells are washed X3 with PBS(+Ca,Mg)+0.5% BSA.

[1192] Then add 20 μl of diluted ExtrAvidin-Alkaline Phosphotase (1:5,000 dilution) to each well and incubated at 37° C. for 30 min. Wells are washed X3 with PBS(+Ca,Mg)+0.5% BSA. 1 tablet of p-Nitrophenol Phosphate pNPP is dissolved in 5 ml of glycine buffer (pH 10.4). 100 μl of pNPP substrate in glycine buffer is added to each test well. Standard wells in triplicate are prepared from the working dilution of the ExtrAvidin-Alkaline Phosphotase in glycine buffer: 1:5,000 (10⁰)>10^{-0.5}>10⁻¹>10^{-1.5}0.5 μl of each dilution is added to triplicate wells and the resulting AP content in each well is 5.50 ng, 1.74 ng, 0.55 ng, 0.18 ng. 100 μl of pNNP reagent must then be added to each of the standard wells. The plate must be incubated at 37° C. for 4 h. A volume of 50 μl of 3M NaOH is added to all wells. The results are quantified on a plate reader at 405 nm. The background subtraction option is used on blank wells filled with glycine buffer only. The template is set up to indicate the concentration of AP-conjugate in each standard well [5.50 ng; 1.74 ng; 0.55 ng; 0.18 ng]. Results are indicated as amount of bound AP-conjugate in each sample.

[1193] The studies described in this example tested activity of agonists or antagonists of the invention. However, one skilled in the art could easily modify the exemplified studies to test the activity of polynucleotides or polypeptides of the invention (e.g., gene therapy).

### Example 30

### Production of Polypeptide of the Invention for High-Throughput Screening Assays

[1194] The following protocol produces a supernatant containing polypeptide of the present invention to be tested. This supernatant can then be used in the Screening Assays described in Examples 32-41.

[1195] First, dilute Poly-D-Lysine (644 587 Boehringer-Mannbeim) stock solution (1 mg/ml in PBS) 1:20 in PBS (w/o calcium or magnesium 17-516F Biowhittaker) for a working solution of 50 ug/ml. Add 200 ul of this solution to each well (24 well plates) and incubate at RT for 20 minutes. Be sure to distribute the solution over each well (note: a 12-channel pipetter may be used with tips on every other channel). Aspirate off the Poly-D-Lysine solution and rinse with 1 ml PBS (Phosphate Buffered Saline). The PBS should remain in the well until just prior to plating the cells and plates may be poly-lysine coated in advance for up to two weeks.

[1196] Plate 293T cells (do not carry cells past P+20) at 2×10⁵ cells/well in 0.5 ml DMEM(Dulbecco's Modified Eagle Medium)(with 4.5 G/L glucose and L-glutamine (12-604F Biowhittaker))/10% heat inactivated FBS(14-503F Biowhittaker)/1× Penstrep(17-602E Biowhittaker). Let the cells grow overnight.

[1197] The next day, mix together in a sterile solution basin: 300 ul Lipofectamine (18324-012 Gibco/BRL) and 5 ml Optimem I (31985070 Gibco/BRL)/96-well plate. With a small volume multi-channel pipetter, aliquot approximately 2 ug of an expression vector containing a polynucleotide insert, produced by the methods described in Examples 8-10, into an appropriately labeled 96-well round bottom plate. With a multi-channel pipetter, add 50 ul of the Lipofectamine/Optimem I mixture to each well. Pipette up and down gently to mix. Incubate at RT 15-45 minutes. After about 20 minutes, use a multi-channel pipetter to add 150 ul Optimem I to each well. As a control, one plate of vector DNA lacking an insert should be transfected with each set of transfections.

[1198] Preferably, the transfection should be performed by tag-teaming the following tasks. By tag-teaming, hands on time is cut in half, and the cells do not spend too much time on PBS. First, person A aspirates off the media from four 24-well plates of cells, and then person B rinses each well with 0.5-1 ml PBS. Person A then aspirates off PBS rinse, and person B, using a 12-channel pipetter with tips on every other channel, adds the 200 ul of DNA/Lipofectamine/Optimem I complex to the odd wells first, then to the even wells, to each row on the 24-well plates. Incubate at 37 degree C. for 6 hours.

[1199] While cells are incubating, prepare appropriate media, either 1% BSA in DMEM with 1× penstrep, or HGS CHO-5 media (116.6 mg/L of CaCl2 (anhyd); 0.00130 mg/L CuSO₄—5H₂O; 0.050 mg/L of Fe(NO₃)₃—9H₂O; 0.417 mg/L of FeSO₄—7H₂O; 311.80 mg/L of Kcl; 28.64 mg/L of MgCl₂; 48.84 mg/L of MgSO₄; 6995.50 mg/L of NaCl; 2400.0 mg/L of NaHCO₃; 62.50 mg/L of NaH₂PO₄—H₂O; 71.02 mg/L of Na₂HPO4; 0.4320 mg/L of ZnSO₄—7H₂O; 0.002 mg/L of Arachidonic Acid; 1.022 mg/L of Cholesterol; 0.070 mg/L of DL-alpha-Tocopherol-Acetate; 0.0520 mg/L of Linoleic Acid; 0.010 mg/L of Linolenic Acid; 0.010 mg/L of Myristic Acid; 0.010 mg/L of Oleic Acid; 0.010 mg/L of Palmitric Acid; 0.010 mg/L of Palmitic Acid; 100 mg/L of Pluronic F-68; 0.010 mg/L of Stearic Acid; 2.20 mg/L of Tween 80; 4551 mg/L of D-Glucose; 130.85 mg/ml of L- Alanine; 147.50 mg/ml of L-Arginine-HCL; 7.50 mg/ml of L-Asparagine-H₂O; 6.65 mg/ml of L-Aspartic Acid; 29.56 mg/ml of L-Cystine-2HCL-H₂O; 31.29 mg/ml of L-Cystine-2HCL; 7.35 mg/ml of L-Glutamic Acid; 365.0 mg/ml of L-Glutamine; 18.75 mg/ml of Glycine; 52.48 mg/ml of L-Histidine-HCL-H₂O; 106.97 mg/ml of L-Isoleucine; 111.45 mg/ml of L-Leucine; 163.75 mg/ml of L-Lysine HCL; 32.34 mg/ml of L-Methionine; 68.48 mg/ml of L-Phenylalainine; 40.0 mg/ml of L-Proline; 26.25 mg/ml of L-Serine; 101.05 mg/ml of L-Threonine; 19.22 mg/ml of L-Tryptophan; 91.79 mg/ml of L-Tryrosine-2Na-2H₂O; and 99.65 mg/ml of L-Valine; 0.0035 mg/L of Biotin; 3.24 mg/L of D-Ca Pantothenate; 11.78 mg/L of Choline Chloride; 4.65 mg/L of Folic Acid; 15.60 mg/L of i-Inositol; 3.02 mg/L of Niacinamide; 3.00 mg/L of Pyridoxal HCL; 0.031 mg/L of Pyridoxine HCL; 0.319 mg/L of Riboflavin; 3.17 mg/L of Thiamine HCL; 0.365 mg/L of Thymidine; 0.680 mg/L of Vitamin B₁₂; 25 mM of HEPES Buffer; 2.39 mg/L of Na Hypoxanthine; 0.105 mg/L of Lipoic Acid; 0.081 mg/L of Sodium Putrescine-2HCL; 55.0 mg/L of Sodium Pyruvate; 0.0067 mg/L of Sodium Selenite; 20 uM of Ethanolamine; 0.122 mg/L of Ferric Citrate; 41.70 mg/L of Methyl-B-Cyclodextrin complexed with Linoleic Acid; 33.33 mg/L of Methyl-B-Cyclodextrin complexed with Oleic Acid; 10 mg/L of Methyl-B-Cyclodextrin complexed with Retinal Acetate. Adjust osmolarity to 327 mOsm) with 2 mm glutamine and 1× penstrep. (BSA (81-068-3 Bayer) 100 gm dissolved in 1L DMEM for a 10% BSA stock solution). Filter the media and collect 50 ul for endotoxin assay in 15 ml polystyrene conical.

[1200] The transfection reaction is terminated, preferably by tag-teaming, at the end of the incubation period. Person A aspirates off the transfection media, while person B adds 1.5 ml appropriate media to each well. Incubate at 37 degree C. for 45 or 72 hours depending on the media used: 1% BSA for 45 hours or CHO-5 for 72 hours.

[1201] On day four, using a 300 ul multichannel pipetter, aliquot 600 ul in one 1 ml deep well plate and the remaining supernatant into a 2 ml deep well. The supernatants from each well can then be used in the assays described in Examples 32-39.

[1202] It is specifically understood that when activity is obtained in any of the assays described below using a supernatant, the activity originates from either the polypeptide of the present invention directly (e.g., as a secreted protein) or by polypeptide of the present invention inducing expression of other proteins, which are then secreted into the supernatant. Thus, the invention further provides a method of identifying the protein in the supernatant characterized by an activity in a particular assay.

### Example 31

### Construction of GAS Reporter Construct

[1203] One signal transduction pathway involved in the differentiation and proliferation of cells is called the Jaks-STATs pathway. Activated proteins in the Jaks-STATs pathway bind to gamma activation site “GAS” elements or interferon-sensitive responsive element (“ISRE”), located in the promoter of many genes. The binding of a protein to these elements alter the expression of the associated gene.

[1204] GAS and ISRE elements are recognized by a class of transcription factors called Signal Transducers and Activators of Transcription, or “STATs.” There are six members of the STATs family. Stat1 and Stat3 are present in many cell types, as is Stat2 (as response to IFN-alpha is widespread). Stat4 is more restricted and is not in many cell types though it has been found in T helper class I, cells after treatment with IL-12. Stat5 was originally called mammary growth factor, but has been found at higher concentrations in other cells including myeloid cells. It can be activated in tissue culture cells by many cytokines.

[1205] The STATs are activated to translocate from the cytoplasm to the nucleus upon tyrosine phosphorylation by a set of kinases known as the Janus Kinase (“Jaks”) family. Jaks represent a distinct family of soluble tyrosine kinases and include Tyk2, Jak1, Jak2, and Jak3. These kinases display significant sequence similarity and are generally catalytically inactive in resting cells.

[1206] The Jaks are activated by a wide range of receptors summarized in the Table below. (Adapted from review by Schidler and Darnell, Ann. Rev. Biochem. 64:621-51 (1995).) A cytokine receptor family, capable of activating Jaks, is divided into two groups: (a) Class 1 includes receptors for IL-2, IL-3, IL-4, IL-6, IL-7, IL-9, IL-11, IL-12, IL-15, Epo, PRL, GH, G-CSF, GM-CSF, LIF, CNTF, and thrombopoietin; and (b) Class 2 includes IFN-a, IFN-g, and IL-10. The Class I receptors share a conserved cysteine motif (a set of four conserved cysteines and one tryptophan) and a WSXWS motif (a membrane proximal region encoding Trp-Ser-Xaa-Trp-Ser (SEQ ID NO:2)).

[1207] Thus, on binding of a ligand to a receptor, Jaks are activated, which in turn activate STATs, which then translocate and bind to GAS elements. This entire process is encompassed in the Jaks-STATs signal transduction pathway.

[1208] Therefore, activation of the Jaks-STATs pathway, reflected by the binding of the GAS or the ISRE element, can be used to indicate proteins involved in the proliferation and differentiation of cells. For example, growth factors and cytokines are known to activate the Jaks-STATs pathway. (See Table below.) Thus, by using GAS elements linked to reporter molecules, activators of the Jaks-STATs pathway can be identified.

| JAKs | STATS GAS(elements) or ISRE | | | | | |
|---|---|---|---|---|---|---|
| Ligand | tyk2 | Jak1 | Jak2 | Jak3 | | |
| IFN family | | | | | | |
| IFN-a/B + | + | − | − | 1,2,3 | | ISRE |
| IFN-g | | + | + | − | 1 | GAS |
| | | | | | | (IRF1>Lys6>JFP) |
| 11-10 | + | ? | ? | − | ? | 1,3 |
| gp130 family | | | | | | |
| IL-6 (Pleiotropic) + | + | + | ? | 1,3 | GAS | |
| | | | | | | (IRF1>Lys6>IFP) |
| I1-11(Pleiotropic) ? | + | ? | 1,3 | | | |
| OnM(Pleiotropic) ? | + | + | ? | 1,3 | | |
| LIF(Pleiotropic) ? | + | + | ? | 1,3 | | |
| CNTF(Pleiotropic) | −/+ | + | + | ? | 1,3 | |
| G-CSF(Pleiotropic) | ? | + | ? | ? | 1,3 | |
| IL-12(Pleiotropic) | + | − | + | + | 1,3 | |
| g-C family | | | | | | |
| IL-2 (lymphocytes) | − | + | − | + | 1,3,5 | GAS |
| IL-4 (lymphlmyeloid) | − | + | − | + | 6 | GAS (IRF1=IFP>>Ly6)(lgH) |
| IL-7 (lymphocytes) | − | + | − | + | 5 | GAS |
| LL-9 (lymphocytes) | − | + | − | + | 5 | GAS |
| IL-13 (lymphocyte) | − | + | ? | ? | 6 | GAS |
| IL-15 | ? | + | ? | + | 5 | GAS |
| gp140 family | | | | | | |
| IL-3 (myeloid) | − | − | + | − | 5 | GAS (IRF1>IFP>Ly6) |
| IL-5 (myeloid) | − | − | + | − | 5 | GAS |
| GM-CSF (myeloid) | − | − | + | − | 5 | GAS |
| Growth hormone family | | | | | | |
| GH | ? | − | + | − | 5 | |
| PRL | ? | +/− | + | − | 1,3,5 | |
| EPO | ? | − | + | − | 5 | GAS(B- |
| | | | | | | CAS>IRF1=IFP>>Ly6) |
| Receptor Tyrosine Kinases | | | | | | |
| EGF | ? | + | + | − | 1,3 | GAS(IRF1) |
| PDGF | ? | + | + | − | 1,3 | |
| CSF-1 | ? | + | + | − | 1,3 | GAS (not IRF1) |

[1209] To construct a synthetic GAS containing promoter element, which is used in the Biological Assays described in Examples 32-33, a PCR based strategy is employed to generate a GAS-SV40 promoter sequence. The 5′ primer contains four tandem copies of the GAS binding site found in the IRF1 promoter and previously demonstrated to bind STATs upon induction with a range of cytokines (Rothman et al., Immunity 1:457-468 (1994).), although other GAS or ISRE elements can be used instead. The 5′ primer also contains 18 bp of sequence complementary to the SV40 early promoter sequence and is flanked with an XhoI site. The sequence of the 5′ primer is:

| | |
|---|---|
| 5′:GCGCCTCGAGATTTCCCCGAAATCTAGATTT | (SEQ ID NO: 3) |
| CCCCGAAATGATTTCCCCGAAATGATTTCCCCG | |
| AAATATCTGCCATCTCAATTAG:3′ | |

[1210] The downstream primer is complementary to the SV40 promoter and is flanked with a Hind III site: 5′:GCGGCAAGCTTTTTGCAAAGCCTAGGC:3′ (SEQ ID NO: 4)

[1211] PCR amplification is performed using the SV40 promoter template present in the B-gal:promoter plasmid obtained from Clontech. The resulting PCR fragment is digested with XhoI/Hind III and subcloned into BLSK2-. (Stratagene.) Sequencing with forward and reverse primers confirms that the insert contains the following sequence:

| | |
|---|---|
| 5′:CTCGAGATTTCCCCGAAATCTAGATTTCCCCG | (SEQ ID NO: 5) |
| AAATGATTTCCCCGAAATGATTTCCCCGAAATATC | |
| TGCCATCTCAATTAGTCAGCAACCATAGTCCCGCC | |
| CCTAACTCCGCCCATCCCGCCCCTAACTCCGCCCA | |
| GTTCCGCCCATTCTCCGCCCCATGGCTGACTAATT | |
| TTTTTTATTTATGCAGAGGCCGAGGCCGCCTCGGC | |
| CTCTGAGCTATTCCAGAAGTAGTGAGGAGGCTTTT | |
| TTGGAGGCCTAGGCTTTTGCAAAAAGCTT:3′ | |

[1212] With this GAS promoter element linked to the SV40 promoter, a GAS:SEAP2 reporter construct is next engineered. Here, the reporter molecule is a secreted alkaline phosphatase, or “SEAP.” Clearly, however, any reporter molecule can be used instead of SEAP, in this or in any of the other Examples. Well known reporter molecules that can be used instead of SEAP include chloramphenicol acetyltransferase (CAT), luciferase, alkaline phosphatase, B-galactosidase, green fluorescent protein (GFP), or any protein detectable by an antibody.

[1213] The above sequence confirmed synthetic GAS-SV40 promoter element is subcloned into the pSEAP-Promoter vector obtained from Clontech using HindIII and XhoI, effectively replacing the SV40 promoter with the amplified GAS:SV40 promoter element, to create the GAS-SEAP vector. However, this vector does not contain a neomycin resistance gene, and therefore, is not preferred for mammalian expression systems.

[1214] Thus, in order to generate mammalian stable cell lines expressing the GAS-SEAP reporter, the GAS-SEAP cassette is removed from the GAS-SEAP vector using SalI and NotI, and inserted into a backbone vector containing the neomycin resistance gene, such as pGFP-1 (Clontech), using these restriction sites in the multiple cloning site, to create the GAS-SEAP/Neo vector. Once this vector is transfected into mammalian cells, this vector can then be used as a reporter molecule for GAS binding as described in Examples 32-33.

[1215] Other constructs can be made using the above description and replacing GAS with a different promoter sequence. For example, construction of reporter molecules containing NFK-B and EGR promoter sequences are described in Examples 34 and 35. However, many other promoters can be substituted using the protocols described in these Examples. For instance, SRE, IL-2, NFAT, or Osteocalcin promoters can be substituted, alone or in combination (e.g., GAS/NF-KB/EGR, GAS/NF-KB, Il-2/NFAT, or NF-KB/GAS). Similarly, other cell lines can be used to test reporter construct activity, such as HELA (epithelial), HUVEC (endothelial), Reh (B-cell), Saos-2 (osteoblast), HUVAC (aortic), or Cardiomyocyte.

### Example 32

### High-Throughput Screening Assay for T-cell Activity

[1216] The following protocol is used to assess T-cell activity by identifying factors, and determining whether supernate containing a polypeptide of the invention proliferates and/or differentiates T-cells. T-cell activity is assessed using the GAS/SEAP/Neo construct produced in Example 31. Thus, factors that increase SEAP activity indicate the ability to activate the Jaks-STATS signal transduction pathway. The T-cell used in this assay is Jurkat T-cells (ATCC Accession No. TIB-152), although Molt-3 cells (ATCC Accession No. CRL-1552) and Molt-4 cells (ATCC Accession No. CRL-1582) cells can also be used.

[1217] Jurkat T-cells are lymphoblastic CD4+ Th1 helper cells. In order to generate stable cell lines, approximately 2 million Jurkat cells are transfected with the GAS-SEAP/neo vector using DMRIE-C (Life Technologies)(transfection procedure described below). The transfected cells are seeded to a density of approximately 20,000 cells per well and transfectants resistant to 1 mg/ml genticin selected. Resistant colonies are expanded and then tested for their response to increasing concentrations of interferon gamma. The dose response of a selected clone is demonstrated.

[1218] Specifically, the following protocol will yield sufficient cells for 75 wells containing 200 ul of cells. Thus, it is either scaled up, or performed in multiple to generate sufficient cells for multiple 96 well plates. Jurkat cells are maintained in RPMI+10% serum with 1% Pen-Strep. Combine 2.5 mls of OPTI-MEM (Life Technologies) with 10 ug of plasmid DNA in a T25 flask. Add 2.5 ml OPTI-MEM containing 50 ul of DMRIE-C and incubate at room temperature for 15-45 mins.

[1219] During the incubation period, count cell concentration, spin down the required number of cells (10⁷ per transfection), and resuspend in OPTI-MEM to a final concentration of 1 cells/ml. Then add 1 ml of 1×10⁷ cells in OPTI-MEM to T25 flask and incubate at 37 degree C. for 6 hrs. After the incubation, add 10 ml of RPMI+15% serum.

[1220] The Jurkat:GAS-SEAP stable reporter lines are maintained in RPMI+10% serum, 1 mg/ml Genticin, and 1% Pen-Strep. These cells are treated with supernatants containing polypeptide of the present invention or polypeptide of the present invention induced polypeptides as produced by the protocol described in Example 30.

[1221] On the day of treatment with the supernatant, the cells should be washed and resuspended in fresh RPMI+10% serum to a density of 500,000 cells per ml. The exact number of cells required will depend on the number of supernatants being screened. For one 96 well plate, approximately 10 million cells (for 10 plates, 100 million cells) are required.

[1222] Transfer the cells to a triangular reservoir boat, in order to dispense the cells into a 96 well dish, using a 12 channel pipette. Using a 12 channel pipette, transfer 200 ul of cells into each well (therefore adding 100,000 cells per well).

[1223] After all the plates have been seeded, 50 ul of the supernatants are transferred directly from the 96 well plate containing the supernatants into each well using a 12 channel pipette. In addition, a dose of exogenous interferon gamma (0.1, 1.0, 10 ng) is added to wells H9, H10, and H11 to serve as additional positive controls for the assay.

[1224] The 96 well dishes containing Jurkat cells treated with supernatants are placed in an incubator for 48 hrs (note: this time is variable between 48-72 hrs). 35 ul samples from each well are then transferred to an opaque 96 well plate using a 12 channel pipette. The opaque plates should be covered (using sellophene covers) and stored at −20 degree C. until SEAP assays are performed according to Example 36. The plates containing the remaining treated cells are placed at 4 degree C. and serve as a source of material for repeating the assay on a specific well if desired.

[1225] As a positive control, 100 Unit/ml interferon gamma can be used which is known to activate Jurkat T cells. Over 30 fold induction is typically observed in the positive control wells.

[1226] The above protocol may be used in the generation of both transient, as well as stable, transfected cells, which would be apparent to those of skill in the art.

### Example 33

### High-Throughput Screening Assay Identifying Myeloid Activity

[1227] The following protocol is used to assess myeloid activity of polypeptide of the present invention by determining whether polypeptide of the present invention proliferates and/or differentiates myeloid cells. Myeloid cell activity is assessed using the GAS/SEAP/Neo construct produced in Example 31. Thus, factors that increase SEAP activity indicate the ability to activate the Jaks-STATS signal transduction pathway. The myeloid cell used in this assay is U937, a pre-monocyte cell line, although TF-1, HL60, or KG1 can be used.

[1228] To transiently transfect U937 cells with the GAS/SEAP/Neo construct produced in Example 31, a DEAE-Dextran method (Kharbanda et. al., 1994, Cell Growth & Differentiation, 5:259-265) is used. First, harvest 2×10⁷ U937 cells and wash with PBS. The U937 cells are usually grown in RPMI 1640 medium containing 10% heat-inactivated fetal bovine serum (FBS) supplemented with 100 units/ml penicillin and 100 mg/ml streptomycin.

[1229] Next, suspend the cells in 1 ml of 20 mM Tris-HCl (pH 7.4) buffer containing 0.5 mg/ml DEAE-Dextran, 8 ug GAS-SEAP2 plasmid DNA, 140 mM NaCl, 5 mM KCl, 375 uM Na₂HPO₄.7H₂O, 1 mM MgCl₂, and 675 uM CaCl₂. Incubate at 37 degrees C. for 45 min.

[1230] Wash the cells with RPMI 1640 medium containing 10% FBS and then resuspend in 10 ml complete medium and incubate at 37 degree C. for 36 hr.

[1231] The GAS-SEAP/U937 stable cells are obtained by growing the cells in 400 ug/ml G418. The G418-free medium is used for routine growth but every one to two months, the cells should be re-grown in 400 ug/ml G418 for couple of passages.

[1232] These cells are tested by harvesting 1×10⁸ cells (this is enough for ten 96-well plates assay) and wash with PBS. Suspend the cells in 200 ml above described growth medium, with a final density of 5×10⁵ cells/ml. Plate 200 ul cells per well in the 96-well plate (or 1×10⁵ cells/well).

[1233] Add 50 ul of the supernatant prepared by the protocol described in Example 30. Incubate at 37 degee C. for 48 to 72 hr. As a positive control, 100 Unit/ml interferon gamma can be used which is known to activate U937 cells. Over 30 fold induction is typically observed in the positive control wells. SEAP assay the supernatant according to the protocol described in Example 36.

### Example 34

### High-Throughput Screening Assay Identifying Neuronal Activity

[1234] When cells undergo differentiation and proliferation, a group of genes are activated through many different signal transduction pathways. One of these genes, EGR1 (early growth response gene 1), is induced in various tissues and cell types upon activation. The promoter of EGR1 is responsible for such induction. Using the EGR1 promoter linked to reporter molecules, activation of cells can be assessed by polypeptide of the present invention.

[1235] Particularly, the following protocol is used to assess neuronal activity in PC12 cell lines. PC12 cells (rat phenochromocytoma cells) are known to proliferate and/or differentiate by activation with a number of mitogens, such as TPA (tetradecanoyl phorbol acetate), NGF (nerve growth factor), and EGF (epidermal growth factor). The EGR1 gene expression is activated during this treatment. Thus, by stably transfecting PC12 cells with a construct containing an EGR promoter linked to SEAP reporter, activation of PC12 cells by polypeptide of the present invention can be assessed.

[1236] The EGR/SEAP reporter construct can be assembled by the following protocol. The EGR-1 promoter sequence (−633 to +1)(Sakamoto K et al., Oncogene 6:867-871 (1991)) can be PCR amplified from human genomic DNA using the following primers:

| | |
|---|---|
| 5′ GCGCTCGAGGGATGACAGCGATAGAACCCCGG-3′ | (SEQ ID |
| | NO: 6) |
| 5′ GCGAAGCTTCGCGACTCCCCGGATCCGCCTC-3′ | (SEQ ID |
| | NO: 7) |

[1237] The downstream primer is complementary to the 3′ end of the SV40 promoter and is flanked with a Hind III site:

| | |
|---|---|
| 5′:GCGGCAAGCTTTTTGCAAAGCCTAGGC:3′ | (SEQ ID NO: 4) |

[1238] PCR amplification is performed using the SV40 promoter template present in the pB-gal:promoter plasmid obtained from Clontech. The resulting PCR fragment is digested with XhoI and Hind III and subcloned into BLSK2-. (Stratagene) Sequencing with the T7 and T3 primers confirms the insert contains the following sequence:

| | |
|---|---|
| 5′:CTCGAGGGGACTTTCCCGGGGACTTTCCGGG | (SEQ ID NO: 10) |
| GACTTTCCGGGACTTTCCATCTGCCATCTCAATT | |
| AGTCAGCAACCATAGTCCCGCCCCTAACTCCGCC | |
| CATCCCGCCCCTAACTCCGCCCAGTTCCGCCCAT | |
| TCTCCGCCCCATGGCTGACTAATTTTTTTTATTT | |
| ATGCAGAGGCCGAGGCCGCCTCGGCCTCTGAGCT | |
| ATTCCAGAAGTAGTGAGGAGGCTTTTTTGGAGGC | |
| CTAGGCTTTTGCAAAAAGCTT:3′ | |

[1239] Next, replace the SV40 minimal promoter element present in the pSEAP2-promoter plasmid (Clontech) with this NF-KB/SV40 fragment using XhoI and HindIII. However, this vector does not contain a neomycin resistance gene, and therefore, is not preferred for mammalian expression systems.

[1240] In order to generate stable mammalian cell lines, the NF-KB/SV40/SEAP cassette is removed from the above NF-KB/SEAP vector using restriction enzymes SalI and NotI, and inserted into a vector containing neomycin resistance. Particularly, the NF-KB/SV40/SEAP cassette was inserted into pGFP-1 (Clontech), replacing the GFP gene, after restricting pGFP-1 with SalI and NotI.

[1241] Once NF-KB/SV40/SEAP/Neo vector is created, stable Jurkat T-cells are created and maintained according to the protocol described in Example 32. Similarly, the method for assaying supernatants with these stable Jurkat T-cells is also described in Example 32. As a positive control, exogenous TNF alpha (0.1, 1, 10 ng) is added to wells H9, H10, and H11, with a 5-10 fold activation typically observed.

### Example 36

### Assay for SEAP Activity

[1242] As a reporter molecule for the assays described in Examples 32-35, SEAP activity is assayed using the Tropix Phospho-light Kit (Cat. BP-400) according to the following general procedure. The Tropix Phospho-light Kit supplies the Dilution, Assay, and Reaction Buffers used below.

[1243] Prime a dispenser with the 2.5× Dilution Buffer and dispense 15 ul of 2.5× dilution buffer into Optiplates containing 35 ul of a supernatant. Seal the plates with a plastic sealer and incubate at 65 degree C. for 30 min. Separate the Optiplates to avoid uneven heating.

[1244] Cool the samples to room temperature for 15 minutes. Empty the dispenser and prime with the Assay Buffer. Add 50 ml Assay Buffer and incubate at room temperature 5 min. Empty the dispenser and prime with the Reaction Buffer (see the Table below). Add 50 ul Reaction Buffer and incubate at room temperature for 20 minutes. Since the intensity of the chemiluminescent signal is time dependent, and it takes about 10 minutes to read 5 plates on a luminometer, thus one should treat 5 plates at each time and start the second set 10 minutes later.

[1245] Read the relative light unit in the luminometer. Set H12 as blank, and print the results. An increase in chemiluminescence indicates reporter activity.

[01190] Reaction Buffer Formulation:

| # of plates | Rxn buffer diluent (ml) | CSPD (ml) |
|---|---|---|
| 10 | 60 | 3 |
| 11 | 65 | 3.25 |
| 12 | 70 | 3.5 |
| 13 | 75 | 3.75 |
| 14 | 80 | 4 |
| 15 | 85 | 4.25 |
| 16 | 90 | 4.5 |
| 17 | 95 | 4.75 |
| 18 | 100 | 5 |
| 19 | 105 | 5.25 |
| 20 | 110 | 5.5 |
| 21 | 115 | 5.75 |
| 22 | 120 | 6 |
| 23 | 125 | 6.25 |
| 24 | 130 | 6.5 |
| 25 | 135 | 6.75 |
| 26 | 140 | 7 |
| 27 | 145 | 7.25 |
| 28 | 150 | 7.5 |
| 29 | 155 | 7.75 |
| 30 | 160 | 8 |
| 31 | 165 | 8.25 |
| 32 | 170 | 8.5 |
| 33 | 175 | 8.75 |
| 34 | 180 | 9 |
| 35 | 185 | 9.25 |
| 36 | 190 | 9.5 |
| 37 | 195 | 9.75 |
| 38 | 200 | 10 |
| 39 | 205 | 10.25 |
| 40 | 210 | 10.5 |
| 41 | 215 | 10.75 |
| 42 | 220 | 11 |
| 43 | 225 | 11.25 |
| 44 | 230 | 11.5 |
| 45 | 235 | 11.75 |
| 46 | 240 | 12 |
| 47 | 245 | 12.25 |
| 48 | 250 | 12.5 |
| 49 | 255 | 12.75 |
| 50 | 260 | 13 |

### Example 37

### High-Throughput Screening Assay Identifying Changes in Small Molecule Concentration and Membrane Permeability

[1246] Binding of a ligand to a receptor is known to alter intracellular levels of small molecules, such as calcium, potassium, sodium, and pH, as well as alter membrane potential. These alterations can be measured in an assay to identify supernatants which bind to receptors of a particular cell. Although the following protocol describes an assay for calcium, this protocol can easily be modified to detect changes in potassium, sodium, pH, membrane potential, or any other small molecule which is detectable by a fluorescent probe.

[1247] The following assay uses Fluorometric Imaging Plate Reader (“FLIPR”) to measure changes in fluorescent molecules (Molecular Probes) that bind small molecules. Clearly, any fluorescent molecule detecting a small molecule can be used instead of the calcium fluorescent molecule, fluo-4 (Molecular Probes, Inc.; catalog no. F-14202), used here.

[1248] For adherent cells, seed the cells at 10,000 -20,000 cells/well in a Co-star black 96-well plate with clear bottom. The plate is incubated in a CO₂ incubator for 20 hours. The adherent cells are washed two times in Biotek washer with 200 ul of HBSS (Hank's Balanced Salt Solution) leaving 100 ul of buffer after the final wash.

[1249] A stock solution of 1 mg/ml fluo-4 is made in 10% pluronic acid DMSO. To load the cells with fluo-4 , 50 ul of 12 ug/ml fluo-4 is added to each well. The plate is incubated at 37 degrees C. in a CO₂ incubator for 60 min. The plate is washed four times in the Biotek washer with HBSS leaving 100 ul of buffer.

[1250] For non-adherent cells, the cells are spun down from culture media. Cells are re-suspended to 2-5×10⁶ cells/ml with HBSS in a 50-ml conical tube. 4 ul of 1 mg/ml fluo-4 solution in 10% pluronic acid DMSO is added to each ml of cell suspension. The tube is then placed in a 37 degrees C. water bath for 30-60 min. The cells are washed twice with HBSS, resuspended to 1×10⁶ cells/ml, and dispensed into a microplate, 100 ul/well. The plate is centrifuged at 1000 rpm for 5 min. The plate is then washed once in Denley Cell Wash with 200 ul, followed by an aspiration step to 100 ul final volume.

[1251] For a non-cell based assay, each well contains a fluorescent molecule, such as fluo-4. The supernatant is added to the well, and a change in fluorescence is detected.

[1252] To measure the fluorescence of intracellular calcium, the FLIPR is set for the following parameters: (1) System gain is 300-800 mW; (2) Exposure time is 0.4 second; (3) Camera F/stop is F/2; (4) Excitation is 488 nm; (5) Emission is 530 nm; and (6) Sample addition is 50 ul. Increased emission at 530 nm indicates an extracellular signaling event caused by the a molecule, either polypeptide of the present invention or a molecule induced by polypeptide of the present invention, which has resulted in an increase in the intracellular Ca⁺⁺ concentration.

### Example 38

### High-Throughput Screening Assay Identifying Tyrosine Kinase Activity

[1253] The Protein Tyrosine Kinases (PTK) represent a diverse group of transmembrane and cytoplasmic kinases. Within the Receptor Protein Tyrosine Kinase RPTK) group are receptors for a range of mitogenic and metabolic growth factors including the PDGF, FGF, EGF, NGF, HGF and Insulin receptor subfamilies. In addition there are a large family of RPTKs for which the corresponding ligand is unknown. Ligands for RPTKs include mainly secreted small proteins, but also membrane-bound and extracellular matrix proteins.

[1254] Activation of RPTK by ligands involves ligand-mediated receptor dimerization, resulting in transphosphorylation of the receptor subunits and activation of the cytoplasmic tyrosine kinases. The cytoplasmic tyrosine kinases include receptor associated tyrosine kinases of the src-family (e.g., src, yes, lck, lyn, fyn) and non-receptor linked and cytosolic protein tyrosine kinases, such as the Jak family, members of which mediate signal transduction triggered by the cytokine superfamily of receptors (e.g., the Interleukins, Interferons, GM-CSF, and Leptin).

[1255] Because of the wide range of known factors capable of stimulating tyrosine kinase activity, identifying whether polypeptide of the present invention or a molecule induced by polypeptide of the present invention is capable of activating tyrosine kinase signal transduction pathways is of interest. Therefore, the following protocol is designed to identify such molecules capable of activating the tyrosine kinase signal transduction pathways.

[1256] Seed target cells (e.g., primary keratinocytes) at a density of approximately 25,000 cells per well in a 96 well Loprodyne Silent Screen Plates purchased from Nalge Nunc (Naperville, Ill.). The plates are sterilized with two 30 minute rinses with 100% ethanol, rinsed with water and dried overnight. Some plates are coated for 2 hr with 100 ml of cell culture grade type I collagen (50 mg/ml), gelatin (2%) or polylysine (50 mg/ml), all of which can be purchased from Sigma Chemicals (St. Louis, Mo.) or 10% Matrigel purchased from Becton Dickinson (Bedford, Mass.), or calf serum, rinsed with PBS and stored at 4 degree C. Cell growth on these plates is assayed by seeding 5,000 cells/well in growth medium and indirect quantitation of cell number through use of alamarBlue as described by the manufacturer Alamar Biosciences, Inc. (Sacramento, Calif.) after 48 hr. Falcon plate covers #3071 from Becton Dickinson (Bedford, Mass.) are used to cover the Loprodyne Silent Screen Plates. Falcon Microtest III cell culture plates can also be used in some proliferation experiments.

[1257] To prepare extracts, A431 cells are seeded onto the nylon membranes of Loprodyne plates (20,000/200 ml/well) and cultured overnight in complete medium. Cells are quiesced by incubation in serum-free basal medium for 24 hr. After 5-20 minutes treatment with EGF (60 ng/ml) or 50 ul of the supernatant produced in Example 30, the medium was removed and 100 ml of extraction buffer ((20 mM HEPES pH 7.5, 0.15 M NaCl, 1% Triton X-100, 0.1% SDS, 2 mM Na3VO4, 2 mM Na4P2O7 and a cocktail of protease inhibitors (# 1836170) obtained from Boehringer Mannheim (Indianapolis, Ind.)) is added to each well and the plate is shaken on a rotating shaker for 5 minutes at 4° C. The plate is then placed in a vacuum transfer manifold and the extract filtered through the 0.45 mm membrane bottoms of each well using house vacuum. Extracts are collected in a 96-well catch/assay plate in the bottom of the vacuum manifold and immediately placed on ice. To obtain extracts clarified by centrifugation, the content of each well, after detergent solubilization for 5 minutes, is removed and centrifuged for 15 minutes at 4 degree C. at 16,000×g.

[1258] Test the filtered extracts for levels of tyrosine kinase activity. Although many methods of detecting tyrosine kinase activity are known, one method is described here.

[1259] Generally, the tyrosine kinase activity of a supernatant is evaluated by determining its ability to phosphorylate a tyrosine residue on a specific substrate (a biotinylated peptide). Biotinylated peptides that can be used for this purpose include PSK1 (corresponding to amino acids 6-20 of the cell division kinase cdc2-p34) and PSK2 (corresponding to amino acids 1-17 of gastrin). Both peptides are substrates for a range of tyrosine kinases and are available from Boehringer Mannheim.

[1260] The tyrosine kinase reaction is set up by adding the following components in order. First, add 10 ul of 5 uM Biotinylated Peptide, then 10 ul ATP/Mg₂₊ (5 mM ATP/50 mM MgCl₂), then 10 ul of 5× Assay Buffer (40 mM imidazole hydrochloride, pH7.3, 40 mM beta-glycerophosphate, 1 mM EGTA, 100 mM MgCl₂, 5 mM MnCl₂, 0.5 mg/ml BSA), then 5 ul of Sodium Vanadate (1 mM), and then 5 ul of water. Mix the components gently and preincubate the reaction mix at 30 degree C. for 2 min. Initial the reaction by adding 10 ul of the control enzyme or the filtered supernatant.

[1261] The tyrosine kinase assay reaction is then terminated by adding 10 ul of 120 mm EDTA and place the reactions on ice.

[1262] Tyrosine kinase activity is determined by transferring 50 ul aliquot of reaction mixture to a microtiter plate (MTP) module and incubating at 37 degree C. for 20 min. This allows the streptavidin coated 96 well plate to associate with the biotinylated peptide. Wash the MTP module with 300 ul/well of PBS four times. Next add 75 ul of anti-phospotyrosine antibody conjugated to horse radish peroxidase (anti-P-Tyr-POD(0.5 u/ml)) to each well and incubate at 37 degree C. for one hour. Wash the well as above.

[1263] Next add 100 ul of peroxidase substrate solution (Boehringer Mannheim) and incubate at room temperature for at least 5 mins (up to 30 min). Measure the absorbance of the sample at 405 nm by using ELISA reader. The level of bound peroxidase activity is quantitated using an ELISA reader and reflects the level of tyrosine kinase activity.

### Example 39

### High-Throughput Screening Assay Identifying Phosphorylation Activity

[1264] As a potential alternative and/or complement to the assay of protein tyrosine kinase activity described in Example 38, an assay which detects activation (phosphorylation) of major intracellular signal transduction intermediates can also be used. For example, as described below one particular assay can detect tyrosine phosphorylation of the Erk-1 and Erk-2 kinases. However, phosphorylation of other molecules, such as Raf, JNK, p38 MAP, Map kinase kinase (MEK), MEK kinase, Src, Muscle specific kinase (MuSK), IRAK, Tec, and Janus, as well as any other phosphoserine, phosphotyrosine, or phosphothreonine molecule, can be detected by substituting these molecules for Erk-1 or Erk-2 in the following assay.

[1265] Specifically, assay plates are made by coating the wells of a 96-well ELISA plate with 0.1 ml of protein G (1 ug/ml) for 2 hr at room temp, (RT). The plates are then rinsed with PBS and blocked with 3% BSA/PBS for 1 hr at RT. The protein G plates are then treated with 2 commercial monoclonal antibodies (10 ng/well) against Erk-1 and Erk-2 (1 hr at RT) (Santa Cruz Biotechnology). (To detect other molecules, this step can easily be modified by substituting a monoclonal antibody detecting any of the above described molecules.) After 3-5 rinses with PBS, the plates are stored at 4 degree C. until use.

[1266] A431 cells are seeded at 20,000/well in a 96-well Loprodyne filterplate and cultured overnight in growth medium. The cells are then starved for 48 hr in basal medium (DMEM) and then treated with EGF (6 ng/well) or 50 ul of the supernatants obtained in Example 30 for 5-20 minutes. The cells are then solubilized and extracts filtered directly into the assay plate.

[1267] After incubation with the extract for 1 hr at RT, the wells are again rinsed. As a positive control, a commercial preparation of MAP kinase (10 ng/well) is used in place of A431 extract. Plates are then treated with a commercial polyclonal (rabbit) antibody (1 ug/ml) which specifically recognizes the phosphorylated epitope of the Erk-1 and Erk-2 kinases (1 hr at RT). This antibody is biotinylated by standard procedures. The bound polyclonal antibody is then quantitated by successive incubations with Europium-streptavidin and Europium fluorescence enhancing reagent in the Wallac DELFIA instrument (time-resolved fluorescence). An increased fluorescent signal over background indicates a phosphorylation by polypeptide of the present invention or a molecule induced by polypeptide of the present invention.

### Example 40

### Assay for the Stimulation of Bone Marrow CD34+ Cell Proliferation

[1268] This assay is based on the ability of human CD34+ to proliferate in the presence of hematopoietic growth factors and evaluates the ability of isolated polypeptides expressed in mammalian cells to stimulate proliferation of CD34+ cells.

[1269] It has been previously shown that most mature precursors will respond to only a single signal. More immature precursors require at least two signals to respond. Therefore, to test the effect of polypeptides on hematopoietic activity of a wide range of progenitor cells, the assay contains a given polypeptide in the presence or absence of other hematopoietic growth factors. Isolated cells are cultured for 5 days in the presence of Stem Cell Factor (SCF) in combination with tested sample. SCF alone has a very limited effect on the proliferation of bone marrow (BM) cells, acting in such conditions only as a “survival” factor. However, combined with any factor exhibiting stimulatory effect on these cells (e.g., IL-3), SCF will cause a synergistic effect. Therefore, if the tested polypeptide has a stimulatory effect on hematopoietic progenitors, such activity can be easily detected. Since normal BM cells have a low level of cycling cells, it is likely that any inhibitory effect of a given polypeptide, or agonists or antagonists thereof, might not be detected. Accordingly, assays for an inhibitory effect on progenitors is preferably tested in cells that are first subjected to in vitro stimulation with SCF+IL+3, and then contacted with the compound that is being evaluated for inhibition of such induced proliferation.

[1270] Briefly, CD34+ cells are isolated using methods known in the art. The cells are thawed and resuspended in medium (QBSF 60 serum-free medium with 1% L-glutamine (500 ml) Quality Biological, Inc., Gaithersburg, Md. Cat# 160-204-101). After several gentle centrifugation steps at 200×g, cells are allowed to rest for one hour. The cell count is adjusted to 2.5×10⁵ cells/ml. During this time, 100 μl of sterile water is added to the peripheral wells of a 96-well plate. The cytokines that can be tested with a given polypeptide in this assay is rhSCF (R&D Systems, Minneapolis, Minn., Cat# 255-SC) at 50 ng/ml alone and in combination with rhSCF and rhIL-3 (R&D Systems, Minneapolis, Minn., Cat# 203-ML) at 30 ng/ml. After one hour, 10 μl of prepared cytokines, 50 μl of the supernatants prepared in Example 30 (supernatants at 1:2 dilution=50 μl) and 20 μl of diluted cells are added to the media which is already present in the wells to allow for a final total volume of 100 μl. The plates are then placed in a 37° C./5% CO₂ incubator for five days.

[1271] Eighteen hours before the assay is harvested, 0.5 μCi/well of [3H] Thymidine is added in a 10 μl volume to each well to determine the proliferation rate. The experiment is terminated by harvesting the cells from each 96-well plate to a filtermat using the Tomtec Harvester 96. After harvesting, the filtermats are dried, trimmed and placed into OmniFilter assemblies consisting of one OmniFilter plate and one OmniFilter Tray. 60 μl Microscint is added to each well and the plate sealed with TopSeal-A press-on sealing film A bar code 15 sticker is affixed to the first plate for counting. The sealed plates are then loaded and the level of radioactivity determined via the Packard Top Count and the printed data collected for analysis. The level of radioactivity reflects the amount of cell proliferation.

[1272] The studies described in this example test the activity of a given polypeptide to stimulate bone marrow CD34+ cell proliferation. One skilled in the art could easily modify the exemplified studies to test the activity of polynrucleotides (e.g., gene therapy), antibodies, agonists, and/or antagonists and fragments and variants thereof. As a nonlimiting example, potential antagonists tested in this assay would be expected to inhibit cell proliferation in the presence of cytokines and/or to increase the inhibition of cell proliferation in the presence of cytokines and a given polypeptide. In contrast, potential agonists tested in this assay would be expected to enhance cell proliferation and/or to decrease the inhibition of cell proliferation in the presence of cytokines and a given polypeptide.

[1273] The ability of a gene to stimulate the proliferation of bone marrow CD34+ cells indicates that polynucleotides and polypeptides corresponding to the gene are useful for the diagnosis and treatment of disorders affecting the immune system and hematopoiesis. Representative uses are described in the “Immune Activity” and “Infectious Disease” sections above, and elsewhere herein.

### Example 41

### Assay for Extracellular Matrix Enhanced Cell Response (EMECR)

[1274] The objective of the Extracellular Matrix Enhanced Cell Response (EMECR) assay is to identify gene products (e.g., isolated polypeptides) that act on the hematopoietic stem cells in the context of the extracellular matrix (ECM) induced signal.

[1275] Cells respond to the regulatory factors in the context of signal(s) received from the surrounding microenvironment. For example, fibroblasts, and endothelial and epithelial stem cells fail to replicate in the absence of signals from the ECM. Hematopoietic stem cells can undergo self-renewal in the bone marrow, but not in in vitro suspension culture. The ability of stem cells to undergo self-renewal in vitro is dependent upon their interaction with the stromal cells and the ECM protein fibronectin (fn). Adhesion of cells to fn is mediated by the α₅.β₁ and α₄.β₁ integrin receptors, which are expressed by human and mouse hematopoietic stem cells. The factor(s) which integrate with the ECM environment and are responsible for stimulating stem cell self-renewal have not yet been identified. Discovery of such factors should be of great interest in gene therapy and bone marrow transplant applications

[1276] Briefly, polystyrene, non tissue culture treated, 96-well plates are coated with fn fragment at a coating concentration of 0.2 μg/cm². Mouse bone marrow cells are plated (1,000 cells/well) in 0.2 ml of serum-free medium. Cells cultured in the presence of IL-3 (5 ng/ml )+SCF (50 ng/ml ) would serve as the positive control, conditions under which little self-renewal but pronounced differentiation of the stem cells is to be expected. Gene products of the invention (e.g., including, but not limited to, polynucleotides and polypeptides of the present invention, and supernatants produced in Example 30), are tested with appropriate negative controls in the presence and absence of SCF(5.0 ng/ml), where test factor supernatants represent 10% of the total assay volume. The plated cells are then allowed to grow by incubating in a low oxygen environment (5% CO₂, 7% O₂, and 88% N₂ ) tissue culture incubator for 7 days. The number of proliferating cells within the wells is then quantitated by measuring thymidine incorporation into cellular DNA. Verification of the positive hits in the assay will require phenotypic characterization of the cells, which can be accomplished by scaling up of the culture system and using appropriate antibody reagents against cell surface antigens and FACScan.

[1277] One skilled in the art could easily modify the exemplified studies to test the activity of polynucleotides (e.g., gene therapy), antibodies, agonists, and/or antagonists and fragments and variants thereof.

[1278] If a particular polypeptide of the present invention is found to be a stimulator of hematopoietic progenitors, polynucleotides and polypeptides corresponding to the gene encoding said polypeptide may be useful for the diagnosis and treatment of disorders affecting the immune system and hematopoiesis. Representative uses are described in the “Immune Activity” and “Infectious Disease” sections above, and elsewhere herein. The gene product may also be useful in the expansion of stem cells and committed progenitors of various blood lineages, and in the differentiation and/or proliferation of various cell types.

[1279] Additionally, the polynucleotides and/or polypeptides of the gene of interest and/or agonists and/or antagonists thereof, may also be employed to inhibit the proliferation and differentiation of hematopoietic cells and therefore may be employed to protect bone marrow stem cells from chemotherapeutic agents during chemotherapy. This antiproliferative effect may allow administration of higher doses of chemotherapeutic agents and, therefore, more effective chemotherapeutic treatment.

[1280] Moreover, polynucleotides and polypeptides corresponding to the gene of interest may also be useful for the treatment and diagnosis of hematopoietic related disorders such as, for example, anemia, pancytopenia, leukopenia, thrombocytopenia or leukemia since stromal cells are important in the production of cells of hematopoietic lineages. The uses include bone marrow cell ex-vivo culture, bone marrow transplantation, bone marrow reconstitution, radiotherapy or chemotherapy of neoplasia.

### Example 42

### Human Dermal Fibroblast and Aortic Smooth Muscle Cell Proliferation

[1281] The polypeptide of interest is added to cultures of normal human dermal fibroblasts (NHDF) and human aortic smooth muscle cells (AOSMC) and two co-assays are performed with each sample. The first assay examines the effect of the polypeptide of interest on the proliferation of normal human dermal fibroblasts (NHDF) or aortic smooth muscle cells (AoSMC). Aberrant growth of fibroblasts or smooth muscle cells is a part of several pathological processes, including fibrosis, and restenosis. The second assay examines IL6 production by both NHDF and SMC. IL6 production is an indication of functional activation. Activated cells will have increased production of a number of cytokines and other factors, which can result in a proinflammatory or immunomodulatory outcome. Assays are run with and without co-TNFa stimulation, in order to check for costimulatory or inhibitory activity.

[1282] Briefly, on day 1, 96-well black plates are set up with 1000 cells/well (NHDF) or 2000 cells/well (AOSMC) in 100 μl culture media. NHDF culture media contains: Clonetics FB basal media, 1 mg/ml hFGF, 5 mg/ml insulin, 50 mg/ml gentamycin, 2% FBS, while AoSMC culture media contains Clonetics SM basal media, 0.5 μg/ml hEGF, 5 mg/ml insulin, 1 μg/ml hFGF, 50 mg/ml gentamycin, 50 μg/ml Amphotericin B, 5% FBS. After incubation at 37° C. for at least 4-5 hours culture media is aspirated and replaced with growth arrest media. Growth arrest media for NHDF contains fibroblast basal media, 50 mg/ml gentamycin, 2% FBS, while growth arrest media for AoSMC contains SM basal media, 50 mg/ml gentamycin, 50 μg/ml Amphotericin B, 0.4% FBS. Incubate at 37° C. until day 2.

[1283] On day 2, serial dilutions and templates of the polypeptide of interest are designed such that they always include media controls and known-protein controls. For both stimulation and inhibition experiments, proteins are diluted in growth arrest media. For inhibition experiments, TNFa is added to a final concentration of 2 ng/ml (NHDF) or 5 ng/ml (AoSMC). Add 1/3 vol media containing controls or polypeptides of the present invention and incubate at 37 degrees C./5% CO₂ until day 5.

[1284] Transfer 60 μl from each well to another labeled 96-well plate, cover with a plate-sealer, and store at 4 degrees C. until Day 6 (for IL6 ELISA). To the remaining 100 μl in the cell culture plate, aseptically add Alamar Blue in an amount equal to 10% of the culture volume (10 μl). Return plates to incubator for 3 to 4 hours. Then measure fluorescence with excitation at 530 nm and emission at 590 nm using the CytoFluor. This yields the growth stimulation/inhibition data.

[1285] On day 5, the IL6 ELISA is performed by coating a 96 well plate with 50-100 ul/well of Anti-Human IL6 Monoclonal antibody diluted in PBS, pH 7.4, incubate ON at room temperature.

[1286] On day 6, empty the plates into the sink and blot on paper towels. Prepare Assay Buffer containing PBS with 4% BSA. Block the plates with 200 μl/well of Pierce Super Block blocking buffer in PBS for 1-2 hr and then wash plates with wash buffer (PBS, 0.05% Tween-20). Blot plates on paper towels. Then add 50 μl/well of diluted Anti-Human IL-6 Monoclonal, Biotin-labeled antibody at 0.50 mg/ml. Make dilutions of IL-6 stock in media (30, 10, 3, 1, 0.3, 0 ng/ml). Add duplicate samples to top row of plate. Cover the plates and incubate for 2 hours at RT on shaker.

[1287] Plates are washed with wash buffer and blotted on paper towels. Dilute EU-labeled Streptavidin 1:1000 in Assay buffer, and add 100 μl/well. Cover the plate and incubate 1 h at RT. Plates are again washed with wash buffer and blotted on paper towels.

[1288] Add 100 μl/well of Enhancement Solution. Shake for 5 minutes. Read the plate on the Wallac DELFIA Fluorometer. Readings from triplicate samples in each assay were tabulated and averaged.

[1289] A positive result in this assay suggests AoSMC cell proliferation and that the polypeptide of the present invention may be involved in dermal fibroblast proliferation and/or smooth muscle cell proliferation. A positive result also suggests many potential uses of polypeptides, polynucleotides, agonists and/or antagonists of the polynucleotide/polypeptide of the present invention which gives a positive result. For example, inflammation and immune responses, wound healing, and angiogenesis, as detailed throughout this specification. Particularly, polypeptides of the present invention and polynucleotides of the present invention may be used in wound healing and dermal regeneration, as well as the promotion of vasculogenesis, both of the blood vessels and lymphatics. The growth of vessels can be used in the treatment of, for example, cardiovascular diseases. Additionally, antagonists of polypeptides and polynucleotides of the invention may be useful in treating diseases, disorders, and/or conditions which involve angiogenesis by acting as an anti-vascular agent (e.g., anti-angiogenesis). These diseases, disorders, and/or conditions are known in the art and/or are described herein, such as, for example, malignancies, solid tumors, benign tumors, for example hemangiomas, acoustic neuromas, neurofibromas, trachomas, and pyogenic granulomas; artheroscieric plaques; ocular angiogenic diseases, for example, diabetic retinopathy, retinopathy of prematurity, macular degeneration, corneal graft rejection, neovascular glaucoma, retrolental fibroplasia, rubeosis, retinoblastoma, uvietis and Pterygia (abnormal blood vessel growth) of the eye; rheumatoid arthritis; psoriasis; delayed wound healing; endometriosis; vasculogenesis; granulations; hypertrophic scars (keloids); nonunion fractures; scleroderma; trachoma; vascular adhesions; myocardial angiogenesis; coronary collaterals; cerebral collaterals; arteriovenous malformations; ischemic limb angiogenesis; Osler-Webber Syndrome; plaque neovascularization; telangiectasia; hemophiliac joints; angiofibroma; fibromuscular dysplasia; wound granulation; Crohn's disease; and atherosclerosis. Moreover, antagonists of polypeptides and polynucleotides of the invention may be useful in treating anti-hyperproliferative diseases and/or anti-inflammatory known in the art and/or described herein.

[1290] One skilled in the art could easily modify the exemplified studies to test the activity of polynucleotides (e.g., gene therapy), antibodies, agonists, and/or antagonists and fragments and variants thereof.

### Example 43

### Cellular Adhesion Molecule (CAM) Expression on Endothelial Cells

[1291] The recruitment of lymphocytes to areas of inflammation and angiogenesis linvolves specific receptor-ligand interactions between cell surface adhesion molecules (CAMs) on lymphocytes and the vascular endothelium. The adhesion process, in both normal and pathological settings, follows a multi-step cascade that involves intercellular adhesion molecule-1 (ICAM-1), vascular cell adhesion molecule-1 (VCAM-1), and endothelial leukocyte adhesion molecule-1 (E-selectin) expression on endothelial cells (EC). The expression of these molecules and others on the vascular endothelium determines the efficiency with which leukocytes may adhere to the local vasculature and extravasate into the local tissue during the development of an inflammatory response. The local concentration of cytokines and growth factor participate in the modulation of the expression of these CAMs.

[1292] Briefly, endothelial cells (e.g., Human Umbilical Vein Endothelial cells (HUVECs)) are grown in a standard 96 well plate to confluence, growth medium is removed from the cells and replaced with 100 μl of 199 Medium (10% fetal bovine serum (FBS)). Samples for testing and positive or negative controls are added to the plate in triplicate (in 10 μl volumes). Plates are then incubated at 37° C. for either 5 h (selectin and integrin expression) or 24 h (integrin expression only). Plates are aspirated to remove medium and 100 μl of 0.1% paraformaldehyde-PBS(with Ca++ and Mg++) is added to each well. Plates are held at 4° C. for 30 min. Fixative is removed from the wells and wells are washed 1× with PBS(+Ca,Mg)+0.5% BSA and drained. 10 μl of diluted primary antibody is added to the test and control wells. Anti-ICAM-1-Biotin, Anti-VCAM-1-Biotin and Anti-E-selectin-Biotin are used at a concentration of 10 μg/ml (1:10 dilution of 0.1 mg/ml stock antibody). Cells are incubated at 37° C. for 30 min. in a humidified environment. Wells are washed three times with PBS(+Ca,Mg)+0.5% BSA. 20 μl of diluted ExtrAvidin-Alkaline Phosphatase (1:5,000 dilution, referred to herein as the working dilution) are added to each well and incubated at 37° C. for 30 min. Wells are washed three times with PBS(+Ca,Mg)+0.5% BSA. Dissolve 1 tablet of p-Nitrophenol Phosphate pNPP per 5 ml of glycine buffer (pH 10.4). 100 μl of pNPP substrate in glycine buffer is added to each test well. Standard wells in triplicate are prepared from the working dilution of the ExtrAvidin-Alkaline Phosphotase in glycine buffer: 1:5,000 (10°)>10^{-0.5}>10⁻¹>10^{-1.5}0.5 μl of each dilution is added to triplicate wells and the resulting AP content in each well is 5.50 ng, 1.74 ng, 0.55 ng, 0.18 ng. 100 μl of pNNP reagent is then added to each of the standard wells. The plate is incubated at 37° C. for 4h. A volume of 50 μl of 3M NaOH is added to all wells. The plate is read on a plate reader at 405 nm using the background subtraction option on blank wells filled with glycine buffer only. Additionally, the template is set up to indicate the concentration of AP-conjugate in each standard well [5.50 ng; 1.74 ng; 0.55 ng; 0.18 ng]. Results are indicated as amount of bound AP-conjugate in each sample.

### Example 44

### Alamar Blue Endothelial Cells Proliferation Assay

[1293] This assay may be used to quantitatively determine protein mediated inhibition of bFGF-induced proliferation of Bovine Lymphatic Endothelial Cells (LECs), Bovine Aortic Endothelial Cells (BAECs) or Human Microvascular Uterine Myometrial Cells (UTMECs). This assay incorporates a fluorometric growth indicator based on detection of metabolic activity. A standard Alamar Blue Proliferation Assay is prepared in EGM-2MV with 10 ng/ml of bFGF added as a source of endothelial cell stimulation. This assay may be used with a variety of endothelial cells with slight changes in growth medium and cell concentration. Dilutions of the protein batches to be tested are diluted as appropriate. Serum-free medium (GIBCO SFM) without bFGF is used as a non-stimulated control and Angiostatin or TSP-1 are included as a known inhibitory controls.

[1294] Briefly, LEC, BAECs or UTMECs are seeded in growth media at a density of 5000 to 2000 cells/well in a 96 well plate and placed at 37degrees C. overnight. After the overnight incubation of the cells, the growth media is removed and replaced with GIBCO EC-SFM. The cells are treated with the appropriate dilutions of the protein of interest or control protein sample(s) (prepared in SFM) in triplicate wells with additional bFGF to a concentration of 10 ng/ml. Once the cells have been treated with the samples, the plate(s) is/are placed back in the 37° C. incubator for three days. After three days 10 ml of stock alamar blue (Biosource Cat# DAL 1100) is added to each well and the plate(s) is/are placed back in the 37° C. incubator for four hours. The plate(s) are then read at 530 nm excitation and 590 nm emission using the CytoFluor fluorescence reader. Direct output is recorded in relative fluorescence units.

[1295] Alamar blue is an oxidation-reduction indicator that both fluoresces and changes color in response to chemical reduction of growth medium resulting from cell growth. As cells grow in culture, innate metabolic activity results in a chemical reduction of the immediate surrounding environment. Reduction related to growth causes the indicator to change from oxidized (non-fluorescent blue) form to reduced (fluorescent red) form (i.e., stimulated proliferation will produce a stronger signal and inhibited proliferation will produce a weaker signal and the total signal is proportional to the total number of cells as well as their metabolic activity). The background level of activity is observed with the starvation medium alone. This is compared to the output observed from the positive control samples (bFGF in growth medium) and protein dilutions.

### Example 45

### Detection of Inhibition of a Mixed Lymphocyte Reaction

[1296] This assay can be used to detect and evaluate inhibition of a Mixed Lymphocyte Reaction (MLR) by gene products (e.g., isolated polypeptides). Inhibition of a MLR may be due to a direct effect on cell proliferation and viability, modulation of costimulatory molecules on interacting cells, modulation of adhesiveness between lymphocytes and accessory cells, or modulation of cytokine production by accessory cells. Multiple cells may be targeted by these polypeptides since the peripheral blood mononuclear fraction used in this assay includes T, B and natural killer lymphocytes, as well as monocytes and dendritic cells.

[1297] Polypeptides of interest found to inhibit the MLR may find application in diseases associated with lymphocyte and monocyte activation or proliferation. These include, but are not limited to, diseases such as asthma, arthritis, diabetes, inflammatory skin conditions, psoriasis, eczema, systemic lupus erythematosus, multiple sclerosis, glomerulonephritis, inflammatory bowel disease, crohn's disease, ulcerative colitis, arteriosclerosis, cirrhosis, graft vs. host disease, host vs. graft disease, hepatitis, leukemia and lymphoma.

[1298] Briefly, PBMCs from human donors are purified by density gradient centrifugation using Lymphocyte Separation Medium (LSM®, density 1.0770 g/ml, Organon Teknika Corporation, West Chester, Pa.). PBMCs from two donors are adjusted to 2×10⁶ cells/ml in RPMI-1640 (Life Technologies, Grand Island, N.Y.) supplemented with 10% FCS and 2 mM glutamine. PBMCs from a third donor is adjusted to 2×10⁵ cells/ml. Fifty microliters of PBMCs from each donor is added to wells of a 96-well round bottom microtiter plate. Dilutions of test materials (50 μl) is added in triplicate to microtiter wells. Test samples (of the protein of interest) are added for final dilution of 1:4; rhuIL-2 (R&D Systems, Minneapolis, Minn., catalog number 202-IL) is added to a final concentration of 1 μg/ml; anti-CD4 mAb (R&D Systems, clone 34930.11, catalog number MAB379) is added to a final concentration of 10 μg/ml. Cells are cultured for 7-8 days at 37° C. in 5% CO₂, and 1 μC of [³H] thymidine is added to wells for the last 16 hrs of culture. Cells are harvested and thymidine incorporation determined using a Packard TopCount. Data is expressed as the mean and standard deviation of triplicate determinations.

[1299] Samples of the protein of interest are screened in separate experiments and compared to the negative control treatment, anti-CD4 mAb, which inhibits proliferation of lymphocytes and the positive control treatment, IL-2 (either as recombinant material or supernatant), which enhances proliferation of lymphocytes.

[1300] One skilled in the art could easily modify the exemplified studies to test the activity of polynucleotides (e.g., gene therapy), antibodies, agonists, and/or antagonists and fragments and variants thereof.

### Example 46

### Assays for Protease Activity

[1301] The following assay may be used to assess protease activity of the polypeptides of the invention.

[1302] Gelatin and casein zymography are performed essentially as described (Heusen et al., Anal. Biochem., 102:196-202 (1980); Wilson et al., Journal of Urology, 149:653-658 (1993)). Samples are run on 10% polyacryamide/0.1% SDS gels containing 1% gelain orcasein, soaked in 2.5% triton at room temperature for 1 hour, and in 0.1M glycine, pH 8.3 at 37° C. 5 to 16 hours. After staining in amido black areas of proteolysis apear as clear areas agains the blue-black background. Trypsin (Sigma T8642) is used as a positive control.

[1303] Protease activity is also determined by monitoring the cleavage of n-a-benzoyl-L-arginine ethyl ester (BAEE) (Sigma B-4500. Reactions are set up in (25 mM NaPO₄, 1 mM EDTA, and 1 mM BAEE), pH 7.5. Samples are added and the change in adsorbance at 260 nm is monitored on the Beckman DU-6 spectrophotometer in the time-drive mode. Trypsin is used as a positive control.

[1304] Additional assays based upon the release of acid-soluble peptides from casein or hemoglobin measured as adsorbance at 280 nm or colorimetrically using the Folin method are performed as described in Bergmeyer, et al., Methods of Enzymatic Analysis, 5 (1984). Other assays involve the solubilization of chromogenic substrates (Ward, Applied Science, 251-317 (1983).

### Example 47

### Identifying Serine Protease Substrate Specificity

[1305] Methods known in the art or described herein may be used to determine the substrate specificity of the polypeptides of the present invention having serine protease activity. A preferred method of determining substrate specificity is by the use of positional scanning synthetic combinatorial libraries as described in GB 2 324 529 (incorporated herein in its entirety).

### Example 48

### Ligand Binding Assays

[1306] The following assay may be used to assess ligand binding activity of the polypeptides of the invention.

[1307] Ligand binding assays provide a direct method for ascertaining receptor pharmacology and are adaptable to a high throughput format. The purified ligand for a polypeptide is radiolabeled to high specific activity (50-2000 Ci/mmol) for binding studies. A determination is then made that the process of radiolabeling does not diminish the activity of the ligand towards its polypeptide. Assay conditions for buffers, ions, pH and other modulators such as nucleotides are optimized to establish a workable signal to noise ratio for both membrane and whole cell polypeptide sources. For these assays, specific polypeptide binding is defined as total associated radioactivity minus the radioactivity measured in the presence of an excess of unlabeled competing ligand. Where possible, more than one competing ligand is used to define residual nonspecific binding.

### Example 49

### Functional Assay in Xenopus Oocytes

[1308] Capped RNA transcripts from linearized plasmid templates encoding the polypeptides of the invention are synthesized in vitro with RNA polymerases in accordance with standard procedures. In vitro transcripts are suspended in water at a final concentration of 0.2 mg/mi. Ovarian lobes are removed from adult female toads, Stage V defolliculated oocytes are obtained, and RNA transcripts (10 ng/oocytc) are injected in a 50 nl bolus using a microinjection apparatus. Two electrode voltage clamps are used to measure the currents from individual Xenopus oocytes in response polypeptides and polypeptide agonist exposure. Recordings are made in Ca2+ free Barth's medium at room temperature. The Xenopus system can be used to screen known ligands and tissue/cell extracts for activating ligands.

### Example 50

### Microphysiometric Assays

[1309] Activation of a wide variety of secondary messenger systems results in extrusion of small amounts of acid from a cell. The acid formed is largely as a result of the increased metabolic activity required to fuel the intracellular signaling process. The pH changes in the media surrounding the cell are very small but are detectable by the CYTOSENSOR microphysiometer (Molecular Devices Ltd., Menlo Park, Calif.). The CYTOSENSOR is thus capable of detecting the activation of polypeptide which is coupled to an energy utilizing intracellular signaling pathway.

### Example 51

### Extract/Cell Supernatant Screening

[1310] A large number of mammalian receptors exist for which there remains, as yet, no cognate activating ligand (agonist). Thus, active ligands for these receptors may not be included within the ligands banks as identified to date. Accordingly, the polypeptides of the invention can also be functionally screened (using calcium, cAMP, microphysiometer, oocyte electrophysiology, etc., functional screens) against tissue extracts to identify its natural ligands. Extracts that produce positive functional responses can be sequentially subfractionated until an activating ligand is isolated and identified.

### Example 52

### Calcium and cAMP Functional Assays

[1311] Seven transmembrane receptors which are expressed in HEK 293 cells have been shown to be coupled functionally to activation of PLC and calcium mobilization and/or cAMP stimulation or inhibition. Basal calcium levels in the HEK 293 cells in receptor-transfected or vector control cells were observed to be in the normal, 100 nM to 200 nM, range. HEK 293 cells expressing recombinant receptors are loaded with fura 2 and in a single day >150 selected ligands or tissue/cell extracts are evaluated for agonist induced calcium mobilization. Similarly, HEK 293 cells expressing recombinant receptors are evaluated for the stimulation or inhibition of cAMP production using standard cAMP quantitation assays. Agonists presenting a calcium transient or cAMP fluctuation are tested in vector control cells to determine if the response is unique to the transfected cells expressing receptor.

### Example 53

### A TP-binding assay

[1312] The following assay may be used to assess ATP-binding activity of polypeptides of the invention.

[1313] ATP-binding activity of the polypeptides of the invention may be detected using the ATP-binding assay described in U.S. Pat. No. 5,858,719, which is herein incorporated by reference in its entirety. Briefly, ATP-binding to polypeptides of the invention is measured via photoaffinity labeling with 8-azido-ATP in a competition assay. Reaction mixtures containing 1 mg/ml of the ABC transport protein of the present invention are incubated with varying concentrations of ATP, or the non-hydrolyzable ATP analog adenyl-5′-imidodiphosphate for 10 minutes at 4° C. A mixture of 8-azido-ATP (Sigma Chem. Corp., St. Louis, Mo.) plus 8-azido-ATP (³²P-ATP) (5 mCi/μmol, ICN, Irvine Calif.) is added to a final concentration of 100 μM and 0.5 ml aliquots are placed in the wells of a porcelain spot plate on ice. The plate is irradiated using a short wave 254 nm UV lamp at a distance of 2.5 cm from the plate for two one-minute intervals with a one-minute cooling interval in between. The reaction is stopped by addition of dithiothreitol to a final concentration of 2 mM. The incubations are subjected to SDS-PAGE electrophoresis, dried, and autoradiographed. Protein bands corresponding to the particular polypeptides of the invention are excised, and the radioactivity quantified. A decrease in radioactivity with increasing ATP or adenly-5′-imidodiphosphate provides a measure of ATP affinity to the polypeptides.

### Example 54

### Small Molecule Screening

[1314] This invention is particularly useful for screening therapeutic compounds by using the polypeptides of the invention, or binding fragments thereof, in any of a variety of drug screening techniques. The polypeptide or fragment employed in such a test may be affixed to a solid support, expressed on a cell surface, free in solution, or located intracellularly. One method of drug screening utilizes eukaryotic or prokaryotic host cells which are stably transformed with recombinant nucleic acids expressing the polypeptide or fragment. Drugs are screened against such transformed cells in competitive binding assays. One may measure, for example, the formulation of complexes between the agent being tested and polypeptide of the invention.

[1315] Thus, the present invention provides methods of screening for drugs or any other agents which affect activities mediated by the polypeptides of the invention. These methods comprise contacting such an agent with a polypeptide of the invention or fragment thereof and assaying for the presence of a complex between the agent and the polypeptide or fragment thereof, by methods well known in the art. In such a competitive binding assay, the agents to screen are typically labeled. Following incubation, free agent is separated from that present in bound form, and the amount of free or uncomplexed label is a measure of the ability of a particular agent to bind to the polypeptides of the invention.

[1316] Another technique for drug screening provides high throughput screening for compounds having suitable binding affinity to the polypeptides of the invention, and is described in great detail in European Patent Application 84/03564, published on Sep. 13, 1984, which is herein incorporated by reference in its entirety. Briefly stated, large numbers of different small molecule test compounds are synthesized on a solid substrate, such as plastic pins or some other surface. The test compounds are reacted with polypeptides of the invention and washed. Bound polypeptides are then detected by methods well known in the art. Purified polypeptides are coated directly onto plates for use in the aforementioned drug screening techniques. In addition, non-neutralizing antibodies may be used to capture the peptide and immobilize it on the solid support.

[1317] This invention also contemplates the use of competitive drug screening assays in which neutralizing antibodies capable of binding polypeptides of the invention specifically compete with a test compound for binding to the polypeptides or fragments thereof. In this manner, the antibodies are used to detect the presence of any peptide which shares one or more antigenic epitopes with a polypeptide of the invention.

### Example 55

### Phosphorylation Assay

[1318] In order to assay for phosphorylation activity of the polypeptides of the invention, a phosphorylation assay as described in U.S. Pat. No. 5,958,405 (which is herein incorporated by reference) is utilized. Briefly, phosphorylation activity may be measured by phosphorylation of a protein substrate using gamma-labeled ³²P-ATP and quantitation of the incorporated radioactivity using a gamma radioisotope counter. The polypeptides of the invention are incubated with the protein substrate, ³²P-ATP, and a kinase buffer. The ³²P incorporated into the substrate is then separated from free ³²P-ATP by electrophoresis, and the incorporated ³²P is counted and compared to a negative control. Radioactivity counts above the negative control are indicative of phosphorylation activity of the polypeptides of the invention.

### Example 56

### Detection of Phosphorylation Activity (Activation) of the Polypeptides of the Invention in the Presence of Polypeptide Ligands

[1319] Methods known in the art or described herein may be used to determine the phosphorylation activity of the polypeptides of the invention. A preferred method of determining phosphorylation activity is by the use of the tyrosine phosphorylation assay as described in U.S. Pat. No. 5,817,471 (incorporated herein by reference).

### Example 57

### Identification of Signal Transduction Proteins that Interact with Polypeptides of the Present Invention

[1320] The purified polypeptides of the invention are research tools for the identification, characterization and purification of additional signal transduction pathway proteins or receptor proteins. Briefly, labeled receptor PTK polypeptide is useful as a reagent for the purification of molecules with which it interacts. In one embodiment of affinity purification, receptor PTK polypeptide is covalently coupled to a chromatography column. Cell-free extract derived from putative target cells, such as carcinoma tissues, is passed over the column, and molecules with appropriate affinity bind to the receptor PTK polypeptides, or specific phosphotyrosine-recognition domains thereof. The receptor PTK polypeptide interacting protein-complex is recovered from the column, dissociated, and the recovered molecule subjected to N-terminal protein sequencing. This amino acid sequence is then used to identify the captured molecule or to design degenerate oligonucleotide probes for cloning the relevant gene from an appropriate cDNA library.

### Example 58

### IL-6 Bioassay

[1321] To test the proliferative effects of the polypeptides of the invention, the IL-6 Bioassay as described by Marz et al. is utilized (Proc. Natl. Acad. Sci., U.S.A., 95:3251-56 (1998), which is herein incorporated by reference). Briefly, IL-6 dependent B9 murine cells are washed three times in IL-6 free medium and plated at a concentration of 5,000 cells per well in 50 μl, and 50 μl of the IL-6-like polypeptide is added. After 68 hrs. at 37° C., the number of viable cells is measured by adding the tetrazolium salt thiazolyl blue (MTT) and incubating for a further 4 hrs. at 37° C. B9 cells are lysed by SDS and optical density is measured at 570 nm. Controls containing IL-6 (positive) and no cytokine (negative) are utilized. Enhanced proliferation in the test sample(s) relative to the negative control is indicative of proliferative effects mediated by polypeptides of the invention.

### Example 59

### Support of Chicken Embryo Neuron Survival

[1322] To test whether sympathetic neuronal cell viability is supported by polypeptides of the invention, the chicken embryo neuronal survival assay of Senaldi et al is utilized (Proc. Natl. Acad. Sci., U.S.A., 96:11458-63 (1998), which is herein incorporated by reference). Briefly, motor and sympathetic neurons are isolated from chicken embryos, resuspended in L15 medium (with 10% FCS, glucose, sodium selenite, progesterone, conalbumin, putrescine, and insulin; Life Technologies, Rockville, Md.) and Dulbecco's modified Eagles medium [with 10% FCS, glutamine, penicillin, and 25 mM Hepes buffer (pH 7.2); Life Technologies, Rockville, Md.], respectively, and incubated at 37° C. in 5% CO₂ in the presence of different concentrations of the purified IL-6-like polypeptide, as well as a negative control lacking any cytokine. After 3 days, neuron survival is determined by evaluation of cellular morphology, and through the use of the calorimetric assay of Mosmann (Mossman, T., J. Immunol. Methods, 65:55-63 (1983)). Enhanced neuronal cell viability as compared to the controls lacking cytokine is indicative of the ability of the inventive purified IL-6-like polypeptide(s) to enhance the survival of neuronal cells.

### Example 60

### Assay for Phosphatase Activity

[1323] The following assay may be used to assess serine/threonine phosphatase (PTPase) activity of the polypeptides of the invention.

[1324] In order to assay for serine/threonine phosphatase (PTPase) activity, assays can be utilized which are widely known to those skilled in the art. For example, the serine/threonine phosphatase (PSPase) activity is measured using a PSPase assay kit from New England Biolabs, Inc. Myelin basic protein (MyBP), a substrate for PSPase, is phosphorylated on serine and threonine residues with cAMP-dependent Protein Kinase in the presence of [³²P]ATP. Protein serine/threonine phosphatase activity is then determined by measuring the release of inorganic phosphate from 32P-labeled MyBP.

### Example 61

### Interaction of Serine/Threonine Phosphatases with other Proteins

[1325] The polypeptides of the invention with serine/threonine phosphatase activity as determined in Example 60 are research tools for the identification, characterization and purification of additional interacting proteins or receptor proteins, or other signal transduction pathway proteins. Briefly, labeled polypeptide(s) of the invention is useful as a reagent for the purification of molecules with which it interacts. In one embodiment of affinity purification, polypeptide of the invention is covalently coupled to a chromatography column. Cell-free extract derived from putative target cells, such as neural or liver cells, is passed over the column, and molecules with appropriate affinity bind to the polypeptides of the invention. The polypeptides of the invention complex is recovered from the column, dissociated, and the recovered molecule subjected to N-terminal protein sequencing. This amino acid sequence is then used to identify the captured molecule or to design degenerate oligonucleotide probes for cloning the relevant gene from an appropriate cDNA library.

### Example 62

### Assaying for Heparanase Activity

[1326] In order to assay for heparanase activity of the polypeptides of the invention, the heparanase assay described by Vlodavsky et al is utilized (Vlodavsky, I., et al., Nat. Med., 5:793-802 (1999)). Briefly, cell lysates, conditioned media or intact cells (1×10⁶ cells per 35-mm dish) are incubated for 18 hrs at 37° C., pH 6.2-6.6, with ³⁵S-labeled ECM or soluble ECM derived peak I proteoglycans. The incubation medium is centrifuiged and the supernatant is analyzed by gel filtration on a Sepharose CL-6B column (0.9×30 cm). Fractions are eluted with PBS and their radioactivity is measured. Degradation fragments of heparan sulfate side chains are eluted from Sepharose 6B at 0.5<Kₐᵥ<0.8 (peak II). Each experiment is done at least three times. Degradation fragments corresponding to “peak II,” as described by Vlodavsky et al., is indicative of the activity of the polypeptides of the invention in cleaving heparan sulfate.

### Example 63

### Immobilization of Biomolecules

[1327] This example provides a method for the stabilization of polypeptides of the invention in non-host cell lipid bilayer constucts (see, e.g., Bieri et al., Nature Biotech 17:1105-1108 (1999), hereby incorporated by reference in its entirety herein) which can be adapted for the study of polypeptides of the invention in the various functional assays described above. Briefly, carbohydrate-specific chemistry for biotinylation is used to confine a biotin tag to the extracellular domain of the polypeptides of the invention, thus allowing uniform orientation upon immobilization. A 50 uM solution of polypeptides of the invention in washed membranes is incubated with 20 mM NaIO4 and 1.5 mg/ml (4 mM) BACH or 2 mg/ml (7.5 mM) biotin-hydrazide for 1 hr at room temperature (reaction volume, 150 ul). Then the sample is dialyzed (Pierce Slidealizer Cassett, 10 kDa cutoff; Pierce Chemical Co., Rockford Ill.) at 4C first for 5 h, exchanging the buffer after each hour, and finally for 12 h against 500 ml buffer R (0.15 M NaCl, 1 mM MgCl2, 10 mM sodium phosphate, pH7). Just before addition into a cuvette, the sample is diluted 1:5 in buffer ROG50 (Buffer R supplemented with 50 mM octylglucoside).

### Example 64

### TAQMAN

[1328] Quantitative PCR (QPCR). Total RNA from cells in culture are extracted by Trizol separation as recommended by the supplier (LifeTechnologies). (Total RNA is treated with DNase I (Life Technologies) to remove any contaminating genomic DNA before reverse transcription.) Total RNA (50 ng) is used in a one-step, 50 ul, RT-QPCR, consisting of Taqman Buffer A (Perkin-Elmer; 50 mM KCl/10 mM Tris, pH 8.3), 5.5 mM MgCl₂, 240 μM each dNTP, 0.4 units RNase inhibitor (Promega), 8% glycerol, 0.012% Tween-20, 0.05% gelatin, 0.3 uM primers, 0.1 uM probe, 0.025 units Amplitaq Gold (Perkin-Elmer) and 2.5 units Superscript II reverse transcriptase (Life Technologies). As a control for genomic contamination, parallel reactions are setup without reverse transcriptase. The relative abundance of (unknown) and 18S RNAs are assessed by using the Applied Biosystems Prism 7700 Sequence Detection System (Livak, K. J., Flood, S. J., Marmaro, J., Giusti, W. & Deetz, K. (1995) PCR Methods Appl. 4, 357-362). Reactions are carried out at 48° C. for 30 min, 95° C. for 10 min, followed by 40 cycles of 95° C. for 15 s, 60° C. for 1 min. Reactions are performed in triplicate.

[1329] Primers (f & r) and FRET probes sets are designed using Primer Express Software (Perkin-Elmer). Probes are labeled at the 5′-end with the reporter dye 6-FAM and on the 3′-end with the quencher dye TAMRA (Biosource International, Camarillo, Calif. or Perkin-Elmer).

### Example 65

### Assays for Metalloproteinase Activity

[1330] Metalloproteinases (EC 3.4.24.-) are peptide hydrolases which use metal ions, such as Zn²⁺, as the catalytic mechanism. Metalloproteinase activity of polypeptides of the present invention can be assayed according to the following methods.

[1331] Proteolysis of Alpha-2-Macroglobulin

[1332] To confirm protease activity, purified polypeptides of the invention are mixed with the substrate alpha-2-macroglobulin (0.2 unit/ml; Boehringer Mannheim, Germany) in 1× assay buffer (50 mM HEPES, pH 7.5, 0.2 M NaCl, 10 mM CaCl₂, 25 μM ZnCl₂ and 0.05% Brij-35) and incubated at 37° C. for 1-5 days. Trypsin is used as positive control. Negative controls contain only alpha-2-macroglobulin in assay buffer. The samples are collected and boiled in SDS-PAGE sample buffer containing 5% 2-mercaptoethanol for 5-min, then loaded onto 8% SDS-polyacrylamide gel. After electrophoresis the proteins are visualized by silver staining. Proteolysis is evident by the appearance of lower molecular weight bands as compared to the negative control.

[1333] Inhibition of Alpha-2-Macroglobulin Proteolysis by Inhibitors of Metalloproteinases

[1334] Known metalloproteinase inhibitors (metal chelators (EDTA, EGTA, AND HgCl₂), peptide metalloproteinase inhibitors (TIMP-1 and TIMP-2), and commercial small molecule MMP inhibitors) are used to characterize the proteolytic activity of polypeptides of the invention. The three synthetic MMP inhibitors used are: MMP inhibitor I, [IC₅₀=1.0 μM against MMP-1 and MMP-8; IC₅₀=30 μM against MMP-9; IC₅₀=150 μM against MMP-3]; MMP-3 (stromelysin-1) inhibitor I [IC₅₀=5 μM against MMP-3], and MMP-3 inhibitor II [Kᵢ=130 nM against MMP-3]; inhibitors available through Calbiochem, catalog # 444250, 444218, and 444225, respectively). Briefly, different concentrations of the small molecule MMP inhibitors are mixed with purified polypeptides of the invention (50 μg/ml) in 22.9 μl of 1× HEPES buffer (50 mM HEPES, pH 7.5, 0.2 M NaCl, 10 mM CaCl₂, 25 μM ZnCl₂ and 0.05% Brij-35) and incubated at room temperature (24° C.) for 2-hr, then 7.1 μl of substrate alpha-2-macroglobulin (0.2 unit/ml) is added and incubated at 37° C. for 20-hr. The reactions are stopped by adding 4× sample buffer and boiled immediately for 5 minutes. After SDS-PAGE, the protein bands are visualized by silver stain.

[1335] Synthetic Fluorogenic Peptide Substrates Cleavage Assay

[1336] The substrate specificity for polypeptides of the invention with demonstrated metalloproteinase activity can be determined using synthetic fluorogenic peptide substrates (purchased from BACHEM Bioscience Inc). Test substrates include, M-1985, M-2225, M-2105, M-2110, and M-2255. The first four are MMP substrates and the last one is a substrate of tumor necrosis factor-α (TNF-α) converting enzyme (TACE). All the substrates are prepared in 1:1 dimethyl sulfoxide (DMSO) and water. The stock solutions are 50-500 μM. Fluorescent assays are performed by using a Perkin Elmer LS 50B luminescence spectrometer equipped with a constant temperature water bath. The excitation λ is 328 nm and the emission λ is 393 nm. Briefly, the assay is carried out by incubating 176 μl 1× HEPES buffer (0.2 M NaCl, 10 mM CaCl₂, 0.05% Brij-35 and 50 mM HEPES, pH 7.5) with 4 μl of substrate solution (50 μM) at 25° C. for 15 minutes, and then adding 20 μl of a purified polypeptide of the invention into the assay cuvett. The final concentration of substrate is 1 μM. Initial hydrolysis rates are monitored for 30-min.

### Example 66

### Characterization of the cDNA Contained in a Deposited Plasmid

[1337] The size of the cDNA insert contained in a deposited plasmid may be routinely determined using techniques known in the art, such as PCR amplification using synthetic primers hybridizable to the 3′ and 5′ ends of the cDNA sequence. For example, two primers of 17-30 nucleotides derived from each end of the cDNA (i.e., hybridizable to the absolute 5′ nucleotide or the 3′ nucleotide end of the sequence of SEQ ID NO:X, respectively) are synthesized and used to amplify the cDNA using the deposited cDNA plasmid as a template. The polymerase chain reaction is carried out under routine conditions, for instance, in 25 ul of reaction mixture with 0.5 ug of the above cDNA template. A convenient reaction mixture is 1.5-5 mM MgCl₂, 0.01% (w/v) gelatin, 20 uM each of dATP, dCTP, dGTP, dTTP, 25 pmol of each primer and 0.25 Unit of Taq polymerase. Thirty five cycles of PCR (denaturation at 94 degree C. for 1 min; annealing at 55 degree C. for 1 min; elongation at 72 degree C. for 1 min) are performed with a Perkin-Elmer Cetus automated thermal cycler. The amplified product is analyzed by agarose gel electrophoresis. The PCR product is verified to be the selected sequence by subcloning and sequencing the DNA product.

[1338] Use of the above methodologies and/or other methodologies known in the art generates fragments from the clone corresponding to the approximate fragments described in Table 8, below. Accordingly, Table 8 provides a physical characterization of certain clones encompassed by the invention. The first column provides the unique clone identifier, “Clone ID NO:Z”, for cDNA clones of the invention, as described in Table 1A. The second column provides the approximate size of the cDNA insert contained in the corresponding cDNA clone.

TABLE 8

| | cDNA |
|---|---|
| Clone ID | Insert |
| NO:Z | Size: |
| HAPQU75 | 1400 |

[1339] It will be clear that the invention may be practiced otherwise than as particularly described in the foregoing description and examples. Numerous modifications and variations of the present invention are possible in light of the above teachings and, therefore, are within the scope of the appended claims.

[1340] The entire disclosure of each document cited (including patents, patent applications, journal articles, abstracts, laboratory manuals, books, or other disclosures) in the Background of the Invention, Detailed Description, and Examples is hereby incorporated herein by reference. In addition, the CD-R copy of the sequence listing submitted herewith and the corresponding computer readable form are both incorporated herein by reference in their entireties. The specification and Sequence Listing of each of the following U.S. applications are herein incorporated by reference in their entirety: application Ser. No. 60/179,065, filed on Jan. 31, 2000; application Ser. No. 60/180,628, filed on Feb. 4, 2000; application Ser. No. 60/214,886, filed on Jun. 28, 2000; application Ser. No. 60/217,487, filed on Jul. 11, 2000; application Ser. No. 60/225,758, filed on Aug. 14, 2000; application Ser. No. 60/220,963, filed on Jul. 26, 2000; application Ser. No. 60/217,496, filed on Jul. 11, 2000; application Ser. No. 60/225,447, filed on Aug. 14, 2000; application Ser. No. 60/218,290, filed on Jul. 14, 2000; application Ser. No. 60/225,757, filed on Aug. 14, 2000; application Ser. No. 60/226,868, filed on Aug. 22, 2000; application Ser. No. 60/216,647, filed on Jul. 7, 2000; application Ser. No. 60/225,267, filed on Aug. 14, 2000; application Ser. No. 60/216,880, filed on Jul. 7, 2000; application Ser. No. 60/225,270, filed on Aug. 14, 2000; application Ser. No. 60/251,869, filed on Dec. 8, 2000; application Ser. No. 60/235,834, filed on Sep. 27, 2000; application Ser. No. 60/234,274, filed on Sep. 21, 2000; application Ser. No. 60/234,223, filed on Sep. 21, 2000; application Ser. No. 60/228,924, filed on Aug. 30, 2000; application Ser. No. 60/224,518, filed on Aug. 14, 2000; application Ser. No. 60/236,369, filed on Sep. 29, 2000; application Ser. No. 60/224,519, filed on Aug. 14, 2000; application Ser. No. 60/220,964, filed on Jul. 26, 2000; application Ser. No. 60/241,809, filed on Oct. 20, 2000; application Ser. No. 60/249,299, filed on Nov. 17, 2000; application Ser. No. 60/236,327, filed on Sep. 29, 2000; application Ser. No. 60/241,785, filed on Oct. 20, 2000; application Ser. No. 60/244,617, filed on Nov. 1, 2000; application Ser. No. 60/225,268, filed on Aug. 14, 2000; application Ser. No. 60/236,368, filed on Sep. 29, 2000; application Ser. No. 60/251,856, filed on Dec. 8, 2000; application Ser. No. 60/251,868, filed on Dec. 8, 2000; application Ser. No. 60/229,344, filed on Sep. 1, 2000; application Ser. No. 60/234,997, filed on Sep. 25, 2000; application Ser. No. 60/229,343, filed on Sep. 1, 2000; application Ser. No. 60/229,345, filed on Sep. 1, 2000; application Ser. No. 60/229,287, filed on Sep. 1, 2000; application Ser. No. 60/229,513, filed on Sep. 5, 2000; application Ser. No. 60/231,413, filed on Sep. 8, 2000; application Ser. No. 60/229,509, filed on Sep. 5, 2000; application Ser. No. 60/236,367, filed on Sep. 29, 2000; application Ser. No. 60/237,039, filed on Oct. 2, 2000; application Ser. No. 60/237,038, filed on Oct. 2, 2000; application Ser. No. 60/236,370, filed on Sep. 29, 2000; application Ser. No. 60/236,802, filed on Oct. 2, 2000; application Ser. No. 60/237,037, filed on Oct. 2, 2000; application Ser. No. 60/237,040, filed on Oct. 2, 2000; application Ser. No. 60/240,960, filed on Oct. 20, 2000; application Ser. No. 60/239,935, filed on Oct. 13, 2000; application Ser. No. 60/239,937, filed on Oct. 13, 2000; application Ser. No. 60/241,787, filed on Oct. 20, 2000; application Ser. No. 60/246,474, filed on Nov. 8, 2000; application Ser. No. 60/246,532, filed on Nov. 8, 2000; application Ser. No. 60/249,216, filed on Nov. 17, 2000; application Ser. No. 60/249,210, filed on Nov. 17, 2000; application Ser. No. 60/226,681, filed on Aug. 22, 2000; application Ser. No. 60/225,759, filed on Aug. 14, 2000; application Ser. No. 60/225,213, filed on Aug. 14, 2000; application Ser. No. 60/227,182, filed on Aug. 22, 2000; application Ser. No. 60/225,214, filed on Aug. 14, 2000; application Ser. No. 60/235,836, filed on Sep. 27, 2000; application Ser. No. 60/230,438, filed on Sep. 6, 2000; application Ser. No. 60/215,135, filed on Jun. 30, 2000; application Ser. No. 60/225,266, filed on Aug. 14, 2000; application Ser. No. 60/249,218, filed on Nov. 17, 2000; application Ser. No. 60/249,208, filed on Nov. 17, 2000; application Ser. No. 60/249,213, filed on Nov. 17, 2000; application Ser. No. 60/249,212, filed on Nov. 17, 2000; application Ser. No. 60/249,207, filed on Nov. 17, 2000; application Ser. No. 60/249,245, filed on Nov. 17, 2000; application Ser. No. 60/249,244, filed on Nov. 17, 2000; application Ser. No. 60/249,217, filed on Nov. 17, 2000; application Ser. No. 60/249,211, filed on Nov. 17, 2000; application Ser. No. 60/249,215, filed on Nov. 17, 2000; application Ser. No. 60/249,264, filed on Nov. 17, 2000; application Ser. No. 60/249,214, filed on Nov. 17, 2000; application Ser. No. 60/249,297, filed on Nov. 17, 2000; application Ser. No. 60/232,400, filed on Sep. 14, 2000; application Ser. No. 60/231,242, filed on Sep. 8, 2000; application Ser. No. 60/232,081, filed on Sep. 8, 2000; application Ser. No. 60/232,080, filed on Sep. 8, 2000; application Ser. No. 60/231,414, filed on Sep. 8, 2000; application Ser. No. 60/231,244, filed on Sep. 8, 2000; application Ser. No. 60/233,064, filed on Sep. 14, 2000; application Ser. No. 60/233,063, filed on Sep. 14, 2000; application Ser. No. 60/232,397, filed on Sep. 14, 2000; application Ser. No. 60/232,399, filed on Sep. 14, 2000; application Ser. No. 60/232,401, filed on Sep. 14, 2000; application Ser. No. 60/241,808, filed on Oct. 20, 2000; application Ser. No. 60/241,826, filed on Oct. 20, 2000; application Ser. No. 60/241,786, filed on Oct. 20, 2000; application Ser. No. 60/241,221, filed on Oct. 20, 2000; application Ser. No. 60/246,475, filed on Nov. 8, 2000; application Ser. No. 60/231,243, filed on Sep. 8, 2000; application Ser. No. 60/233,065, filed on Sep. 14, 2000; application Ser. No. 60/232,398, filed on Sep. 14, 2000; application Ser. No. 60/234,998, filed on Sep. 25, 2000; application Ser. No. 60/246,477, filed on Nov. 8, 2000; application Ser. No. 60/246,528, filed on Nov. 8, 2000; application Ser. No. 60/246,525, filed on Nov. 8, 2000; application Ser. No. 60/246,476, filed on Nov. 8, 2000; application Ser. No. 60/246,526, filed on Nov. 8, 2000; application Ser. No. PT172, filed on Nov. 17, 2000; application Ser. No. 60/246,527, filed on Nov. 8, 2000; application Ser. No. 60/246,523, filed on Nov. 8, 2000; application Ser. No. 60/246,524, filed on Nov. 8, 2000; application Ser. No. 60/246,478, filed on Nov. 8, 2000; application Ser. No. 60/246,609, filed on Nov. 8, 2000; application Ser. No. 60/246,613, filed on Nov. 8, 2000; application Ser. No. 60/249,300, filed on Nov. 17, 2000; application Ser. No. 60/249,265, filed on Nov. 17, 2000; application Ser. No. 60/246,610, filed on Nov. 8, 2000; application Ser. No. 60/246,611, filed on Nov. 8, 2000; application Ser. No. 60/230,437, filed on Sep. 6, 2000; application Ser. No. 60/251,990, filed on Dec. 8, 2000; application Ser. No. 60/251,988, filed on Dec. 5, 2000; application Ser. No. 60/251,030, filed on Dec. 5, 2000; application Ser. No. 60/251,479, filed on Dec. 6, 2000; application Ser. No. PJ005, filed on Dec. 5, 2000; application Ser. No. PJ006, filed on Dec. 1, 2000; application Ser. No. 60/251,989, filed on Dec. 8, 2000; application Ser. No. 60/250,391, filed on Dec. 1, 2000; and application Ser. No. 60/254,097, filed on Dec. 11, 2000.

[1341] Moreover, the microfiche copy and the corresponding computer readable form of the Sequence Listing of U.S. application Ser. No. 60/179,065, and the hard copy of and the corresponding computer readable form of the Sequence Listing of U.S. application Ser. No. 60/180,628 are also incorporated herein by reference in their entireties.

The application's sequence listing, which the Patent Office published only in electronic form, follows.

SEQUENCE LISTING (428 sequences)

SEQ ID NO: 1 - DNA, 733 bp, Homo sapiens
gggatccggagcccaaatcttctgacaaaactcacacatgcccaccgtgcccagcacctgaattcgagggtgcaccgtcagtcttcctcttccccccaaaacccaaggacaccctcatgatctcccggactcctgaggtcacatgcgtggtggtggacgtaagccacgaagaccctgaggtcaagttcaactggtacgtggacggcgtggaggtgcataatgccaagacaaagccgcgggaggagcagtacaacagcacgtaccgtgtggtcagcgtcctcaccgtcctgcaccaggactggctgaatggcaaggagtacaagtgcaaggtctccaacaaagccctcccaacccccatcgagaaaaccatctccaaagccaaagggcagccccgagaaccacaggtgtacaccctgcccccatcccgggatgagctgaccaagaaccaggtcagcctgacctgcctggtcaaaggcttctatccaagcgacatcgccgtggagtgggagagcaatgggcagccggagaacaactacaagaccacgcctcccgtgctggactccgacggctccttcttcctctacagcaagctcaccgtggacaagagcaggtggcagcaggggaacgtcttctcatgctccgtgatgcatgaggctctgcacaaccactacacgcagaagagcctctccctgtctccgggtaaatgagtgcgacggccgcgactctagaggat

SEQ ID NO: 2 - protein, 5 aa, Homo sapiens
  Site (3): Xaa equals any of the twenty naturally ocurring L-amino acids
WSXWS

SEQ ID NO: 3 - DNA, 86 bp, Artificial Sequence
  Primer_Bind: Synthetic sequence with 4 tandem copies of the GAS binding site found in the IRF1 promoter (Rothman et al., Immunity 1:457-468 (1994)), 18 nucleotides complementary to the SV40 early promoter, and a Xho I restriction site.
gcgcctcgagatttccccgaaatctagatttccccgaaatgatttccccgaaatgatttccccgaaatatctgccatctcaattag

SEQ ID NO: 4 - DNA, 27 bp, Artificial Sequence
  Primer_Bind: Synthetic sequence complementary to the SV40 promter; includes a Hind III restriction site.
gcggcaagctttttgcaaagcctaggc

SEQ ID NO: 5 - DNA, 271 bp, Artificial Sequence
  Protein_Bind: Synthetic promoter for use in biological assays; includes GAS binding sites found in the IRF1 promoter (Rothman et al., Immunity 1:457-468 (1994)).
ctcgagatttccccgaaatctagatttccccgaaatgatttccccgaaatgatttccccgaaatatctgccatctcaattagtcagcaaccatagtcccgcccctaactccgcccatcccgcccctaactccgcccagttccgcccattctccgccccatggctgactaattttttttatttatgcagaggccgaggccgcctcggcctctgagctattccagaagtagtgaggaggcttttttggaggcctaggcttttgcaaaaagctt

SEQ ID NO: 6 - DNA, 32 bp, Artificial Sequence
  Primer_Bind: Synthetic primer complementary to human genomic EGR-1 promoter sequence (Sakamoto et al., Oncogene 6:867-871 (1991)); includes a Xho I restriction site.
gcgctcgagggatgacagcgatagaaccccgg

SEQ ID NO: 7 - DNA, 31 bp, Artificial Sequence
  Primer_Bind: Synthetic primer complementary to human genomic EGR-1 promoter sequence (Sakamoto et al., Oncogene 6:867-871 (1991)); includes a Hind III restriction site.
gcgaagcttcgcgactccccggatccgcctc

SEQ ID NO: 8 - DNA, 12 bp, Homo sapiens
ggggactttccc

SEQ ID NO: 9 - DNA, 73 bp, Artificial Sequence
  Primer_Bind: Synthetic primer with 4 tandem copies of the NF-KB binding site (GGGGACTTTCCC), 18 nucleotides complementary to the 5' end of the SV40 early promoter sequence, and a XhoI restriction site.
gcggcctcgaggggactttcccggggactttccggggactttccgggactttccatcctgccatctcaattag

SEQ ID NO: 10 - DNA, 256 bp, Artificial Sequence
  Protein_Bind: Synthetic promoter for use in biological assays; includes NF-KB binding sites.
ctcgaggggactttcccggggactttccggggactttccgggactttccatctgccatctcaattagtcagcaaccatagtcccgcccctaactccgcccatcccgcccctaactccgcccagttccgcccattctccgccccatggctgactaattttttttatttatgcagaggccgaggccgcctcggcctctgagctattccagaagtagtgaggaggcttttttggaggcctaggcttttgcaaaaagctt

SEQ ID NO: 11 - DNA, 314 bp, Homo sapiens
  SITE (48): n equals a,t,g, or c
gaaagttgatgctattgggcccatctcaagctgatcttggcacctctnatgctctgctctcttcaaccagacctctacattccattttggaagaagactaaaaatgttaatcttccttctggcatggatcttggaatgcaaacttgctgggatctccgagttccaggcttcccgtgcagccggtgtggagagccaagagatgttttgtttggcataaagcattccaagggtcagtgggcttgggctcaactattgagcatagggcaagggcagccccatcctgactgtgaactytttcccacaagrgrcaaaac

SEQ ID NO: 12 - DNA, 270 bp, Homo sapiens
  SITE (269): n equals a,t,g, or c
aattcggcagagcagttccctcctgggtggtcatttgggttgtttcaatctttgctattacaaataaagcttcaacaaataactccacagatatatatgctccttgacttatgatggggttatgtctcaagaagcccatcataaataaaaaacatcccaagtctaatatgcatttaatacttcaataaactcattataaatttaaaaaattgtaagttgaaccatcatgagtcagggaccattactgtatatagtatttacacatgtgna

SEQ ID NO: 13 - DNA, 370 bp, Homo sapiens
agggggggggaggcaggtgcagcagcaggcagggtaaaggtaaataaaggctgagtgataggtggggtctcagtgacagagttcgaggcagcatcgctcttgtcctccaaggcctggttgaaccactgtaatgaagccttcttctctgaagtctaggtcctcggcagtgaatcgaatagccaagctggggaggtggaggcaaggtcagctgttcccctcgccgagaaggcagcagctgaactttccgcttacgctgcccagagctgccaggtgtagactgagaattcgagttttgtttcttccttggggttgtatctgcagccttttytccctgggactccttgtctgctgccaatggagttgaagaact

SEQ ID NO: 14 - DNA, 269 bp, Homo sapiens
  SITE (123): n equals a,t,g, or c
  SITE (269): n equals a,t,g, or c
agggttccatctgcaattgagcaccctttctgcagaaagtaaagatggccttgctgagagatcttttgtctctgtgctgactttcctttgtggcaccaatgaatctatttctaacaattttgnatatttctaacaattttggtggcaatcgtatggggatacattctcctctgggggcatctctagtcctctttcatgaggaggcaccacaccacctcttgcggtggcctcaggggtaagggaccaagacccacctggtgccgaggaan

SEQ ID NO: 15 - DNA, 337 bp, Homo sapiens
  SITE (337): n equals a,t,g, or c
aattcggcagagttgggagctttttcaggttggctcccatgaccttttgatatgtgcaccccaccccatacacacacccctcttttttaaagcactttctttctttctggcaccatcacatgcttcaggtttattttatatttttcctgccctagccccaggaacaaccagttctctagtgaatcttgctttcttttattagagaatggtatttagaaaccaagatctggatgctagatgtgttcattgctgctgtttctagcccctcccagtagagatttctaggrtatttatgtttgtacactactgcatacacacaktggggttccatrtttan

SEQ ID NO: 16 - DNA, 427 bp, Homo sapiens
cggcaccgcgcagggaatcccagcagcggggttctggccccagcacgcgttgcggcagcctggcgagcgtccttgcggcctccaagtgccggtgggaaaaatcatgtcttcttccagagtggggctccgtttggctgcctgtttactaaacgtttcagaagccggaagaaaatacattgttgagaacatagcaaaagcagctcttcttgacaaaaatggaaagaaacatcctcaagtttcagtgctcaatatattttccgatcaagactacaagagatcagtcattacaatagcaacttctgttgataagttgggccttgctgaggatctggtgctgcatgttcctggctgcagcgtgtttctctttggcgaactgacctgcctgagaagcgcagtcttgtgcagagaaggaagcactgggctggtt

SEQ ID NO: 17 - DNA, 317 bp, Homo sapiens
  SITE (172): n equals a,t,g, or c
  SITE (243): n equals a,t,g, or c
  SITE (244): n equals a,t,g, or c
gtttatcattatcaatactcgccatttcaaagaatacgtaaataattaatagtagtgattttcctaactttatttagtcaaaaattagccttttaattctgctgtaacccgtacatgcccaaaatagggggcgggttacacagaatatataacatcgtaggtgtctgggtgnacagtttattcctggcatccactaaatataatggagcccgctttttaagctggcatccagaaaaaaaaagnntcccagcaccaaaatattgttttcttcaccaaccatcagttcataggtccattctcttagcgcaactacagag

SEQ ID NO: 18 - DNA, 475 bp, Homo sapiens
  SITE (446): n equals a,t,g, or c
  SITE (457): n equals a,t,g, or c
acagcagtctggaggagagacctcttcccagggcagcccaggggccatcaggagggttcatctcatgcattagaggtcttgggaagaatgaggcttcctttcctccatcaaagcaagcaaatcctttaaaagctgcatctccaagggctgctccgggctcatagcaagcaacgtcggascccagaggcaaggctgtgctactcagctgccctctggggtcacaaaggcttcacttggcttctaagagctgatgaggcctctcgcaagggaccctgtgtgcatgggctgaccctgaaacttcccagcctctcttcttctcaragcamcctcagtgggcctctcgggggttaccctcattgataccatgtctcctcgtgttttgtccagatccaattccagggttcagaaccgcatcgcagcaatctttcctgaaatgcaattcaganttcagccagcnaaagaagttgctgggcgg

SEQ ID NO: 19 - DNA, 466 bp, Homo sapiens
  SITE (427): n equals a,t,g, or c
gttaaatatctgatgaatgaaagaacggagcccagagggcttcataggatgccctgctcagtttgggttgggagcagctggggctagaggaacagggggcaaagcaggcttatgaacttgagcagccactgtggtcaggcacagcaaatgacaccagcaaggtcagttgtacaatataaataagatttatagaaaaagctccatacctttaaggttgaaccagggagttgtggaagtgagaagaggtttttggtttgggtttttgtttttacattagagactctgttctgacaagtgcaaggctcttgcaagatacctgtggcaatcaaatccagtgctgtggtgggggtttggagaacakggtctcctagctcmaatcatctcctcaktgggagtaagatggtgactctcyttgsccaaccakganccctaaactttatggagctgggctaaccaacttataggg

SEQ ID NO: 20 - DNA, 248 bp, Homo sapiens
  SITE (217): n equals a,t,g, or c
  SITE (241): n equals a,t,g, or c
gagaaactgacagtgagaccaccctctaggatgaagcagcttctcccagatgggagatggagagcctggcttagtcttcactgggagggtcttaacttctctgtgcctgtttccttctttatcaaacagagggagtccgtctgcctatagaaaactggagatctattgatgaaaagtattgcttagatgcaaagctctcccctttgtagtaattaanatacctaaagctaaatattatatntcccctc

SEQ ID NO: 21 - DNA, 432 bp, Homo sapiens
gagccatgtacagcagcccgctgctgtagtggctgctctgagcagccacaaacctcccgtgcggggcgaacctccagctgccagtcccgaggcttccacgtgtcagagcaaatgtgatgacccggaagaggagctctgtcacacaagaaagcttttataggaaagcccagtgacatgggccagcagccacagcatattgtaaactgaagatgaccagctcgtgggaccatctagataagctgttttttgtaaggagtttgtgtgctgttggaaaacatggaaaatgcatccttaacacctgagctctggtcatcttcagtattttctgtcatttgcaaaagctttcagagggcattgtgtatccgtaataatgtccttgaagtcagagactggaaatgttgatccttagtcttctatagacaaggaggtcag

SEQ ID NO: 22 - DNA, 369 bp, Homo sapiens
gaaagcagaagggacaaataaaagcaattggcaaaaactgtcaataatagtttatacacttaactatatcaataatcacattatatgtaaatagtctaaacaatccaattattttttacttctacttatgttatatttttacttctacatttgttaaaggttccacgctacatttttactattcttgctttaaataattttaataatttcttttaaagtttagataataagaaaatatcccgggccaggcacagtggccacacctgtaatctcagtagccatgaccataccaatgcactccagcctgtgaaacagagtgagactctgtctctacagaaaaataaaaaaggaaagaaagaaaaaaaaaaa

SEQ ID NO: 23 - DNA, 439 bp, Homo sapiens
gttcggtgctgtgtgccggcgcctctggcaggctgtcacgggaaaacttcactgtacactgggattggggaatttttctgtaaacacttctaagggcaatacagccaaaaatggtggcttgcttctcagtaccaatatgaagtgggtacagttttcaaacctacacgttgatgttccaaaggatttgaccaaacctgtggtaacaatctctgatgaaccagacatattatataagcgcctctcggttttggtgaaaggtcacgataaggctgtattggacagttatgaatattttgctgtgcttgctgctaaagaacttggtaactctattaaagtacatgaacctccaaggaaaatagagcgatttactcttctccaatcagtgcatatttacaagaagcacagagttcagtatgaaatgagaacactttacagatgt

SEQ ID NO: 24 - DNA, 538 bp, Homo sapiens
  SITE (532): n equals a,t,g, or c
  SITE (538): n equals a,t,g, or c
tgaatctcaattatctgttcacaagtaattccttaactaaaaaacagtagatattgaacgagaaggtcatgtttaaatccttccattaatttctacatttctgatcatttgcttttggggatttttttaaagcagagtataattcagtggaagtgtgtctttgtccccagaggtttctgcatgtgcaagcattttaatctagactgccagaacccccaggctttttagtgaagtttgcagaggaagacttatctgtattgacttatatgttgcacagaacaaatgaaagtctcagacagtccttttttacccaacaaaggcttatttttttccatcctttgcttgggstcaagcactcctgccctgcgtgcctccactttaaacatgatcagaactgtgcttcattgcaaataacaactgaccaacaatggggccckgcttcatagatttgggaatgtttggcttaagctgccaatgactgaaggcctttaattcccaccggccagtcacagyctgctttgtggtggcctgntgatgn

SEQ ID NO: 25 - DNA, 416 bp, Homo sapiens
gctgattatgggactgtttaatagattaatgtgactgcaaaagctaaaattcttcctaggttattgaaaagtcatattctcatctaaatctactacactgtcattttatattcaatttaaattccctcttcccccccagcaggaattaaaaggagtttcctttctttgctcgttcgccctctggttagctgctgcttctgacttttccagagctggggcaaagggaagcaatgtaaagaaaattgaagggtcttacttaactgtaggtgctgttgtaatcttgctgtatgtctccatggcagctgcccaaatgatgacttgtcctctggggccatgatgagcaagggcctgctcacttagagatgggagataggggtgtcataacaccacagtgttccatcaggttaacaattatt

SEQ ID NO: 26 - DNA, 505 bp, Homo sapiens
  SITE (458): n equals a,t,g, or c
  SITE (469): n equals a,t,g, or c
  SITE (471): n equals a,t,g, or c
  SITE (485): n equals a,t,g, or c
  SITE (499): n equals a,t,g, or c
gtcaggttcggggtgggcctttcgggaaatcacacactttcaggatgcagctcgccttcggggatgctcctgggcctggggtagctggtttggcctctggggctgaccctagggcctggtgagcgagggggtaacaagagatgtcaggaaagcgccatccctgagaccaggtctccccgtttctgtagcatgatggggcccagcttgcagaaggtggtggggacagggcctgcttcctgtgccagtgttccacttgggagggcagggggcttccaagtgggctggcttcaactcagggacagtcctaaaaggggggcagagtctcggtgtaagggccccctaagaggactcttctggcattcaatgggtggagaaatcttgcttacactggttgtctgaacacatgggggttcctgactttagggacaagtttcctgggcccttctgctcttggcaantaagggttggnanttgtgtgcaacggncaagggaaaatgtntgtggt

SEQ ID NO: 27 - DNA, 243 bp, Homo sapiens
gcaaacactgagaaacttcaagtactcatatattgctaatgggagtaaaaagtatcagttctttggaaagcagtttattaatagttatgaaaattactctcatatatacaccctttaacatgacattttcatttcagcagatatttttatatgtgagatatgatggatttataatattacttttgcaacattgtaatagcaaggattagaaacaacctgaggccgggtgtggtggctcacgcc

SEQ ID NO: 28 - DNA, 675 bp, Homo sapiens
  SITE (503): n equals a,t,g, or c
  SITE (508): n equals a,t,g, or c
  SITE (542): n equals a,t,g, or c
  SITE (618): n equals a,t,g, or c
  SITE (633): n equals a,t,g, or c
  SITE (637): n equals a,t,g, or c
gctcgtgccgatgaaaatgtggaatggtggtgcatggcgtaratcaccttctcagttgatgctgtacaagctgaagcaatggatatgaatggaacaaattgctcagcagtttcttataactctaactttctgtgacctgagttcaactatctctagtatacctgaataatatataagttggtattgtggcctaatatggggggaggtaatttctgatttttacattggttttatttctaaggtatttgtatacatagactctaacagaacacaaattcagaaacagatagttttgtatttgttcaggcgaaaatgacagacatcctctcttagctgtaggggaagaaactttgaggaaaagaagcgtctgacggtttctgaaaaccaagctaaaagggacaaaaatagaatgagatccttttctatggcattctttctctgtggttttaggaaatggtcttaataatttcttttaattctgtaattcttttttgtttgtttgntttanttcaggaccacaaataggaaaatctgccatttgnatttttgcttaatcagctctctcattagcacattctaatgtaaatgttccctgatttattgactgaagtttagtgnattctccatgtatgnttgntatgcatagactggttgctgctaattgccttgaatttt

SEQ ID NO: 29 - DNA, 518 bp, Homo sapiens
  SITE (323): n equals a,t,g, or c
  SITE (426): n equals a,t,g, or c
  SITE (438): n equals a,t,g, or c
  SITE (452): n equals a,t,g, or c
ggaaacttggagcctcctgaagggcatacagccctgctgacacctaagcctggtgagacccacattggacttgtgaccctcagaactgtcagacagtgaaatcacgtcgttctaaaccagtcagctgagtggtcacggcggcagtagatgagtgcacctcccctttccaaccttctaaacctcaggtgttgccttctccactaggccaagcgatgctccaggaaacctcaggtcacagccagatgctccaccctccatcagtttctcatgtgtccttgaaaagtcataaaaaatgttgaccagaatgtcagcacagacagtanaggtgggagtgtttctttggagtgggtgccgctgcctggttgtttgggccatgcacagaaggcttgtggcaggagcctagggtgtccatttagccttctctgntgtgttggcttncatagggtcactgncttctcgctgtgctctctatgtgaacacagagtttctgcttcactgtggggatgaagaggcttcac

SEQ ID NO: 30 - DNA, 476 bp, Homo sapiens
gggcaggtgatcaaggccttgagaggcttacacccttccttctactccctggtgttactccctccagcctcctacagtgattcacctccctgtaagtgggaggggtggcacgaagtttctcttccctttgtttctgagttctgcctccttccctccctgccgcctgaccaggtccagtggggcagtctacagggctgccccagcctcctgatattcccacctgggtcatctccaccctggggttcaaagggacagagcccttccttacagtgtcccaatggaagtggctgctagaagcagagtttgcacctggagatccagggctcacagacggctgatgatttacctgtggcgggcacatgacctttaacaagccactctcacacacctcactctatttaatctccacgacaataccacgaagaaagtttattaatcgggagtctttggattgcaagtgacagaaaccaaactca

SEQ ID NO: 31 - DNA, 301 bp, Homo sapiens
  SITE (239): n equals a,t,g, or c
  SITE (247): n equals a,t,g, or c
  SITE (266): n equals a,t,g, or c
ggccggcgtgtggagcacatcctgaagctgtgggtgatcgaggccaaggacctgccagccaakaagaagtacctgtgcgagctgtgcctggacgatgtgctctatgcccgcaccacgggcaagctcaaracggacaatgttttctggggcgagcacttcgagttccacaacttgccgcctctgcgcacggtcactgtccacctgtaccgggaagaccgacaagaagaaaaaaaaaggancgcaacanttacctgggcctggttgancctacctgctgcctccgttggccgggcggcaattc

SEQ ID NO: 32 - DNA, 414 bp, Homo sapiens
  SITE (144): n equals a,t,g, or c
  SITE (321): n equals a,t,g, or c
  SITE (369): n equals a,t,g, or c
  SITE (411): n equals a,t,g, or c
aaaatattcatgggcagcgggacccatggtgaagtcactgtgttcttctctccaccctcacccaatagagatttaggtcaaaggagtaatggtgactacaagaataaggccttccagaatcaatctagaggtggatgccacagnagatccagtggttcagatttttttctgaggtcactctgaaagayttctcctgtaaaacagtcagctgcttgtytctgtcttgtgatagtagctgggtagcttcctttcctctacaggaactcttactaggttccatcttcctgtccgtgattgaaacttctgggactctcctaatangttctctctgcatttttatgatatagtgcttcaggtaatcagccaggntccctgcaggcctcttctacctgcctactgtctaacaaatangaa

SEQ ID NO: 33 - DNA, 512 bp, Homo sapiens
  SITE (349): n equals a,t,g, or c
  SITE (430): n equals a,t,g, or c
  SITE (498): n equals a,t,g, or c
  SITE (503): n equals a,t,g, or c
  SITE (510): n equals a,t,g, or c
gcagagcggagggtgacgggagctgcctgtgctggaggaatcactttttaggcgcttgttttggaccattgcacaaacccgggtgcaaaccccaagctcaccagcgtgagtgagctgggccagcagcagggaggagaggggaaggtgggcgaggagggcgccgcgcaccccgaggcccgtgtgggcggtgggaagatcccgggggcggctttggacagccccggcagcgaccccttccccagcccgacaagtgagcgccaagccagccgcgggtggctcaggcctgtaatcccagcactttgggaagctgaggccagtggatcacctgaagttcaagattcgagaccangcctgaccaacatggtgaaaccccatctctactaaaattacaaaaattaagccaggcatggttggcgcattcctgttaatncccagctatttcggggaaggcttgaaggcaaggaagaaattgctccgaaaccccaggaaggccagaanatttncaaattnaa

SEQ ID NO: 34 - DNA, 243 bp, Homo sapiens
  SITE (221): n equals a,t,g, or c
  SITE (228): n equals a,t,g, or c
ggacacattctgcaagcagaccatgacattcccatcaagtagaggaaccagtaaaaatgtgcttaaaagttaggatgtcagggaaggtagtgtgaaaagagtgagttttcaattctttgaaagaaagacaawgaaggcaggcagaaagtgttttggctctttaatctgtatgtaaatttccatgtgaatcttaaaaaaaaaaaaattctgttaaaaatttnactgccnccagctctagccttt

SEQ ID NO: 35 - DNA, 621 bp, Homo sapiens
  SITE (521): n equals a,t,g, or c
  SITE (573): n equals a,t,g, or c
  SITE (575): n equals a,t,g, or c
  SITE (596): n equals a,t,g, or c
  SITE (613): n equals a,t,g, or c
cactttaggtgacactatagaaggtacgcctgcaggtaccggtccggaattcccgggtcgacccacgcgtccggsyacrgtgacacctcctggcttggcaagagaagactggaaaattataagagcactctctgagattgctggaatgactcttccatatgatactctggatcaagtaaggaacagattggaagaagtctctcctaatcttgttcgatatgatgatattgaaggggctaattacttccagcaagcaaatgagctctcaaagctagtgaaccagcagcttcttgctgacccacttgttccacctcagctaactataaaagacttctacatgacagattcaattagcagagcctcacagacaatggccaaatgtgtcaaagctgtcacagagggtgcccaggcagtagaggaaccatccatatgctgaagcttctactaggatcccagttttgccgcagataattaatggrcaactgtagtgcagtgatcctttacaggtttatttctttgtnaaaaaaattaataataatttggattcatgtaatatttaaggttatactatgncntttttgaaatgttattggttntcacctttgcagtttgnaaacatgt

SEQ ID NO: 36 - DNA, 287 bp, Homo sapiens
  SITE (1): n equals a,t,g, or c
natgtaaaccataaatacatatgtctactatgtacccacaaaattaaataaaaataaaaattatagtaattattctctagtatttcaactgctacctkacttgctatttctgtgctacctttcatagtagaattccttaagaattttctktacttgctatctgcagttcttttacttctatcatctctacttcagtcaaatattcctcccattttccaccaaaactgtccttgttagtgtcaccagcacccttcatgttggctaaaatccagtgggttaaatttttc

SEQ ID NO: 37 - DNA, 483 bp, Homo sapiens
  SITE (426): n equals a,t,g, or c
  SITE (447): n equals a,t,g, or c
  SITE (471): n equals a,t,g, or c
  SITE (480): n equals a,t,g, or c
ggcctgttctctgaggttctccctgcaggaggatcgtaagaaaaaggaactgaactaatgatataagcgattttctaaaaatagccctgcacctctgccctagggaggaagggaaaggcccattcatctagctgcatcctgaagtagagcgatagccagtgacagagaaggaatacaaggataatgaagaggctcagggattacaataagaaccgtgtggccgggcgcggtggcttatgcctgtaatcccagcactttgggaggccaaggcgggtggatcacgaggtcaagagatcgagactatcctggccaacatggtgaaaccccttctcttctaaaaatacaaaaattagttcggtgtggtggtgggcacctgtatcccagctactggggaagctgaagcaggaaatcgcttgcacccagtangcggaagttgcagtgaccganatcgcccactgcctccaacctgtnacaaaccangac

SEQ ID NO: 38 - DNA, 436 bp, Homo sapiens
  SITE (152): n equals a,t,g, or c
  SITE (376): n equals a,t,g, or c
agatgaataattaaataattgtgcatatatatatatatatttacatgtggtcattaaaaattgtgttacccttctacatgctaacatgaaaacagttctgcaatatattaatttaaaaaaaaaaaaaaaaaaaaaaagggcggccgctctanaggatccctcgaggggcccaagcttacgcgtgcatgcgacgtcatagctctctccctatagtgagtcgtattataagctagcttgggatctttgtgaaggaaccttacttctgtggtgtgacataattggacaaactacctacagagatttaaagctctaaggtaaatataaaatttttaagtgtataatgtgttaaactaactgcatatgcytgctgcttganaattttgcttactgagtttgatttatgaaaatattataccccggaactagtgaacccaat

SEQ ID NO: 39 - DNA, 358 bp, Homo sapiens
  SITE (349): n equals a,t,g, or c
ggtgatctgcccacttcagcctcccaaaattctgggactgcaggtatgagccaccatgcccagcctaaagaggtatttaaaaagtcatttttgataagaaaatgtggaacattattttggtcttttaggtgtcttgaacatagtctacctaatcatctagacaggaagataattaacctctattttaacaaacatttttcttcttgaaatgaaatattcttttagataccaaaatgaattaaaattgagtgattactattaaagctgcaaaattatttgggagactgagatggagggatcgcttgagctcaggagttcgagaccagcctgggcaaccgtgaaactttgnctctactga

SEQ ID NO: 40 - DNA, 693 bp, Homo sapiens
  SITE (597): n equals a,t,g, or c
gctgctctgatagaccaaggtcgctggagcaaccgtactgctaaaggataagctcttcaaaatcaaaagggacagatttcttaagtttctagtttgttttgtgtttttacatctatttctaccatacgaaagagtaggatggtgagatgcatttctaaatatttttaactactcagtctggatggttaggcttcaagaaaaggaatttatttagtctgaaataaagcaattttgccatttaaaattgaattactttgtagtttaatgattactattgagcaaacaaatctttacagtaatataagtcagcaaaagttttttaaaaggtttaaatccctccttccttacatctatttcattgcttttttaggtttgggaagtaaagcaccagaggaagcatgtgtaaatccttgtataatcgcaggctgtaagtctttagcatctcaggaagttactaacttcaaactaagtatataggtagagtttcttactaaatctagtgcttcttgaaccacaagtagaaagcatttaaaacatgaatgttgttttgtgttttttgaagtttgtaaatagaagacttgttgatgatccgatggncarggtatttttcycttgggkatggtattttagttattyccycgtgatgcataagtgaaaagagtgaagtttctcagaatgagcaactgtcatcca

SEQ ID NO: 41 - DNA, 584 bp, Homo sapiens
  SITE (522): n equals a,t,g, or c
  SITE (582): n equals a,t,g, or c
gatctggagtaagaggcacctactgaaaccggaaggtggctgagaaggttttatgtgaggtgtggacgggaggctattggactagaaggcattagttggtctgttaggacaaagtatacaagcagcaaacgcggtagatttatgtgtggtaggtgaaggctgtgaatcttttatgagtagttgagcaagaacagttgtctgattctgcggtgtcggagagtggagggtctcaggtagtgtcttggtcaggtttgaaggttaatttactgctagtggagggccaaatactcaaaagagtttttaattctcactactggggctgatcctcctcctacactccacccctcctgccatccctgtgacagttcatctcgttttgcctcagcagcacaagaactcactccctccgaagtaatggcatacatatkgtttgcttttgactagatggcagtcaggaatcccttaattctttatgttaaaaaaaaagtgttggtttaaagacaacatcagaagatactctcngaaaatctgccctccaggggagtttctcagctgtcatgttggggcatgtgtaatatagcnta

SEQ ID NO: 42 - DNA, 624 bp, Homo sapiens
atctctgtaattctttattaaaaatactgctgtacacatagagactgaaaacaggattaaagatgaataacacaaattgggtcatgacattagaacctaacacactggtgctttttagggaagttgttgacatccaaatcacagaaccaaggtcaaaagcaaaatacaaaggtaccctcaaaaatatttacaatgaagtaaatacactaacagaatttaaaacaggtacaaaatattgaaatgaccaacgttacatgatttcaagggttgtcctttctgtgcttttatctgtcacgacaggaaggtgtggaaagtttatatccttaatttgactactcttggatattaaaatctttctattaattaaaaagacttttagacaacctcttaaatggrattacactatggaaaacagggctcccccaaaaacacctaggcagaactgagagttctttgaaaaccattcccaataaaaactaaatgaaaaataaatataaaacaaagcttaaaaaaatatgcattacctgacaccaaccttttctggctgacaatatttattcatgaaaacatatcagctgtctaccttttatatgcaaaccaagtcctgaggttaactaggggctg

SEQ ID NO: 43 - DNA, 574 bp, Homo sapiens
agatccagcggcttgctgtgagtccgggagcaaaattgtacccatttcaaagatgtgatgactaaagtctcgagagggccaaggctcgccaaggttgctctgtggtgacagctttacctccttgctatgtattctcagatattgcaaacggacgagagaaaagtggagaatgaatcctggagaaaacaaggtcgttcgacgatttcgacacgtcgcatccctgagagtctctcgtgtcctgatcaactcgagaactggaggcggtgacattttagatgctgcagtgaaagccacagagccacggaaggccgagactccaccatgtttgtgatcttcacattcagcaaactcactcgcactctgcctcatcttatctctagaatgtattttaccacactgtgtcccttctttagtgggaatgtctttggccaaaaataatgaatagttctgacctgacttgctaatacccagtgataaaaggatggaatttgttgggaataaaagaaaactaagcttacaaacgagggccctgatgctccgttccgagcttggtcatctaatttccagccaaaaa

SEQ ID NO: 44 - DNA, 365 bp, Homo sapiens
ctgtgttcttccaccggagttaagggaaatttcacaactccccaggggctaatgtggagttcattttcacttactgctgaatcaactgaagttcctttcagagtcttttcctagagtggaaaagtatctgagctcttcaacctactattcattagtgctgagagacaaaaatcatgttagagtctataatgtaatggagcataaaacatttaagttatgaatctgcataaaatgtgtaaaagatgaaaaaacatactttaatgtttgtcagtacttattgatcagtgaaagaacattttcattaatgcctcagcctgtgaatggatgtcaataaakatgagtgagaaggatttcatatacaaaaa

SEQ ID NO: 45 - DNA, 645 bp, Homo sapiens
  SITE (461): n equals a,t,g, or c
  SITE (567): n equals a,t,g, or c
  SITE (606): n equals a,t,g, or c
  SITE (628): n equals a,t,g, or c
ctggaaaccttccccggaatttycgggtcgacccacgcgtccgctcagagaaagcattttaacttttatagtaaacaataaaaaagcctcataaagcttctcacaacaacttcattcgtttcagaagttaagatatattccttatgaataccaacattgtgacatttgtgttgccaattattttctctggaatcattcttttaacttcacttcctgttgtttgggaagactttgcagagaacatatttttaataggctataatcacacgggcaacagagatcttggcaagtagctattaacggtatagacagaaacttggagtgtgatggttttagacttcctgtgcttcatgatgctattttaatgcactaagagtataaactaaatttagatcctgctgactgktgctggagtgagtgcatgtctcttttgcagacaatgctagatttartttctgggnatttttgcaagctgggagtgcagtttgaagctccagccttctaagcatttttatagctatacatatggatttcatgactgctttgawttgcaactgggcacttaangtttggtgggtcttaaagcgggtactggcacttgggggnggttcgcggggggggtcattgnattttaattttaataaa

SEQ ID NO: 46 - DNA, 395 bp, Homo sapiens
ctggagtagaaaatctttcacacataaaacttcaccattagctaagataaattcctttttgtgtggaataacatgattgtaaatataaactgcatttcacaaataacatggatttgaaatacttctcaatgtttgagtcatttacaaactgtgtaaactgagacctgggagaccatctaaatcaaaatcctgagtggaacagtattcaaggtaggctttggggacagttcccccaaatgtwacactgtttcagtagtgttggtacccatctataatacaaattgtttttaaaaataagttttattgtgtatatatcaggtatattacatgatgttatgggacacatatagatagtcmaaatggttactatwgtgaagccaaataaaccatttccc

SEQ ID NO: 47 - DNA, 674 bp, Homo sapiens
  SITE (400): n equals a,t,g, or c
agtggtgagacacatccagtggacgcccagggagatggaggtgtacatcaggcacttggagaaggtgttaaggcgctatgtccagaggctgcagtggctgctgtccgggagccgccgactgtttggcaccgttttggagagcaaagtatgcatattgctggacacgtcagggtcatgggcccctacctgcagcaggtgaagacagagctggttttgctgatttgggaacagctgcggaagtgctgtgacagttttaacctgctcagctttgcagagagccttcagtcatggcaggacacgctggtggagaccacagatgcagcgtgtcatgaggctatgcaatgggtgacccacctgcaagctcagggcagcacctccatcttgcaagcattgctgaaanctttcagtttccatgatctggaaggattgtacctcctgaccgacggaaagccagacacaagctgcagccttgtcctaaatgaagtccaaaaactcagggagaaaagagatgtgaaagtgcacaccatttccttgaactgctcagacagarcggsggttgarttcctgaraaagctggcttcctycaccggcggacgctatcactgscctgtgggtgaggacacactctccaaaattcacagcctgctgamcaaaggcttcatcaatgaaaagga

SEQ ID NO: 48 - DNA, 744 bp, Homo sapiens
aaatggtcgatcaaaaggaaccaactatattgagcaccatgcgtgatcatctgatcgttactgctaccttgtgagttaaaggctactcttctcattttagaaatgagaaaagagatgcccagagaggacgagtaacttgccttaggtcacacagcttatattaatcacaataacatttgccgcaccttctgtattttttttaagttgctaagcttttggtgcatgtctggcaccgttttagttgtatattatttcatttaattgttaaaatgaccttctgatgcaggtatttgtagctttgccattccacagatgaagaaacagatgaaaggactgaattgttcaataggaaggagcagaatcaggatatgaacttgggttggcctgattcttggggctgcattctttccataacataattgcttgctgtgatgtcctgggctactctgccaggggtggttagtggagtgaatggagaataatttagacaaggtcagtaactcccatgccatctagaaattaaaagtttaaaaggcagagtctgcaactctccttgatttctacagaaataaagatgatccctcctgtgacagtgctaagtgacaattctgagtgtaaatgcgctttttggcacaaattgtcctgtcctaatagtcttgattataattataaaataatgggtttctgaaaggcgcaagcagttctgggaatggcaataaaggtttagaaatgaaaaaaaaaaaa

SEQ ID NO: 49 - DNA, 636 bp, Homo sapiens
  SITE (559): n equals a,t,g, or c
  SITE (624): n equals a,t,g, or c
  SITE (635): n equals a,t,g, or c
ggtccagtaattgcacttttgcatatacagccaagaggacctgttctgatccacacaaaaaaacaagtattaaggtatttattccattatggtttgcggtagtaagtagacaaattggactcacagatatctgtctcttcggaagtcagtgaactaacttgactggatccatagtgtggaatatgatacagcagttagaagcaacttactggacatatatacagaaataagggtatgtcytttaaatttagcataaagggaaaacaaaagctttagcacaatgccatttaattactttaaagcgtatgcatgcatacatacaaacmtattcaaggstwcgtgtcaaatacaagaagggtacccattaagaagagggtaatcggagtgggtttagggataaagaagaaaaatatacatgttattatatttaatacagcaagcctttgacatatatattcttatactcacatatgatattcttactactacataaataaatataggaagctgactccaaaattgtaagtaacttatattaaggttgcattatatattaagngcagagctagtattccagctcatatgtcctgactctaaagccatattatttcccttatggcattnttaaattggana

SEQ ID NO: 50 - DNA, 884 bp, Homo sapiens
  SITE (858): n equals a,t,g, or c
  SITE (876): n equals a,t,g, or c
  SITE (884): n equals a,t,g, or c
ctttttttttttttaaagagaacaagaaaagtacaacattgcttaagtcctacctcatctttatttttttacagatgaatgtacttatcttttctgcagggattgagcctgtgaagtgataatttctatctacctcataaatctttacatttccttctgcaacaggccctcttcccctcctcagtggagtytgcatttccctcttyccctgcgtggggcatgatatgcacaagcctggcatctgtatggctgggagggcactggatgtgtgtggtggggtgtattctgtagattgagccaaggaaacacaaaaaaaaactactaagtaaaaaaacaaaaaactataaaacatggaaaaaataggatttgaaatgcataattatagaatacctgtgttcttgagaatactgtttatatggggtttagattatgttgtgttgttttgatctttttggaaaatcttctctttttaaatgctgcaacagagaaatttcctctgttctctgtttatacctcagtgtgtttaacatcctcttctgcatcgtttcttgatcttaracgttgtggctgtggcttgctagccaagaaaagcagacccttcatattttagggtatataatctttgkttcttttaagggagggtgtgtgcatgtttgtttcaaagccatcttgcacccaagtagtaaagctgaaaatgacacactgcctyccaaagaacctctcctttcacactttggttcttaaaaaagtatatagatggwacttcaagattttkgataaacatattctcaaaarttatgctttctwatttkgctggtaggttatwaagggttaaatggaaggaaaaaaaaaaaaaangggggcccttttaaaganccaatttn

SEQ ID NO: 51 - DNA, 777 bp, Homo sapiens
  SITE (51): n equals a,t,g, or c
  SITE (114): n equals a,t,g, or c
  SITE (116): n equals a,t,g, or c
  SITE (703): n equals a,t,g, or c
  SITE (759): n equals a,t,g, or c
gctaatgctaatcttatcaagtgagaaaaaacccaaccagcatatgagttnttactgctttggaaagagttctctgatccttaaggagataattataatgaaaccatttatagntntatcatgctttacttccagaaaatgctttatactggtgacagtctgactcggccattctatgtgcctcaaaacagagtgcaggcggkgcacggtggctcacacctgtaatcccagcactttgtgaggccaaggtgggcagatcacttgaggtcaggagttcaagaccagcctggccaacatggtgaaacactgtctctactaaaaatacaaaaattagctgggtgtgttggcgggcgcctgtaattccagctactcgggaggctgaggcaggagaattgcctgaacccaagaggtggaggttgcagtgagccaagattgagtgaaactccatctgaaaaaaaaagaaagactaaaataatagggcttagtctaccctaacttattctcatcttttaggagatttttgcagaactttaacaattatcagtatccctgacctcaatttgatgctgaaaagtatgctaggtagtagtaattttgaaagctatttgcttttttggttggttgtaactcaaattagtaaaaatgaacatgggtttgccccggggggcagagggttcaagtgagcccgtgatcgtgccactgnacttcagcctgggtgacagagagagactctgtctaaaaaaaaaaaaaaaaaaaaanggggggcctttttaaagg

SEQ ID NO: 52 - DNA, 476 bp, Homo sapiens
cttccatctgaccccagaaattttaagtatcatttaatcttgcttaggaacagtgagatttatttctcatatgtagccaaaatatgaaaggaaatatgttcttgattttttttttgactgacattactgaacagtatatggctcttttttgtttggttaactaaatgcagaaagagccctgatctaaattcaaagttggattcataaacagaatgagtawawatgaagaggattctatttataaacattgtcagagtgtcataaatgagtaaatatgaaaataactagaatcacataaaataaaatctgagaactcagcctgcatttcaaagaacatcattctatatgcttgtcagtgttcatattatattttactgtgggtggggagtataaaagatggaaagaaagatgtatgctatgaggctttttcccctctctttattacaccttaataaaacataaaaagataaaaaaaa

SEQ ID NO: 53 - DNA, 429 bp, Homo sapiens
  SITE (423): n equals a,t,g, or c
ccgagaccgtccactacaagagaggggtgagccagcagttctccctgccctccttcaagattgacttctcggaatggaaggatgacgagctgaactttgacctggaccggggcgtgtttccagtagtcatccaggctgtggtggacgaaggagatgtggtggaagtgactggccacgcccacgtgctcttggctgcctttgaaaagcacatggacggcagcttctctgtgaagcctttaaagcagaagcaaattgtggaycgggtcakctacctcctgcaggagatctatsgcwttgagaacaagaacaaccaggakascaagcccttcggacgacgagaacagcgacaacagcaacgagtgtgtggtgtgcctgtccgacctgcgggacacgttgattcctgccctgccgccacctgttgcnttgtta

SEQ ID NO: 54 - DNA, 728 bp, Homo sapiens
  SITE (29): n equals a,t,g, or c
  SITE (39): n equals a,t,g, or c
cttgactgattcgattatcgaccactatnggaattgccntcgagccaaaattcggcacgaggtttgttttgtgggttctgagctctctgacatcagatcatgtaaagtcgattgtatgttttggaaggcaaagtcttggcttttgagactgaagttaagtgggcacagtggcccctgctgctgtgcccagtctgagtaccttggctagactctaggtcaggctccaggagcatgagaattgatccccagaagaaccattttaactccatctgatactccattgcctatgaaatgtaaaatgtgaactccctgtgctgcttgtagacagttcccataactgtccacggccctggagcacgcacccagggcagagctgcccttactcacctctgctctggtgtcttgggagttgtgcagggactctggcccaggcaggggaaggaagaccaggcggtaggggactggtcttgctgttagagtatagaggtttgtaatgcagttttcttcataatgtgtcagtgattgtgtgaccaaggcagcatctagcagaaagccaggcatggagtaggtgatcgatacttgtcaatgactaaataataacaataaaagagcacttgggtgaatctgggcacctgatttctgagttttgagttctggagctagtgttttgacaatgctttgggttttgacatgccttttccacaaatctcttgccttttcagggcaaa

SEQ ID NO: 55 - DNA, 498 bp, Homo sapiens
  SITE (459): n equals a,t,g, or c
atagtggaaacttattatgaaattgtgttccagttcagtaattttctagttctatgattctcaattctggtgcacatgagctttaaaaaataaaaataaaaaaaataatgtgtgccatattctgacaggttcagtaaaactctctggggatggggcttgaagaatgggtatgtttctaaagctctctggatgattctaatgtgcaaccaagattgaaaaccacttaactcaggtarggtttgagacaaatctgtctgattctgattgggcagattacattaaaaggaaggtttactttgcatgctagttattttcctttaaaggrtttgtcagaatttagtattttgtttttagaaaatgatgtcaaatctaaattctgtcttttttattcctaatagrtgctgacatttttaatgttggtgargactgtctacccyttgtccmagtgcaatactgcanaaagtttgggacccgacttgttttaagccattacgttgc

SEQ ID NO: 56 - DNA, 437 bp, Homo sapiens
gtattctttaagaacagctataatgacattgcatattaaacatcatactctgacatctaatctgatttttaaaaattcatatactaatgtgccttaaaaatgtcacttcaagtctacttttctttttttctcttgttttgatgttatgkgtaagcactagtaataaaaaatttaaaaatattgtggtatgacaacatatgtggcactcaaaatgctggtaactgcattactgcagtttttagtgtgccaagtagcagtgcaaaatgatgacagcaccacataagtctcctttgcatttgttcaactctgccattctaatgtgaaagcaatcatagacartacctaaacgaatgagtgtggccatgttccaataaaattycatgarcactgaaagttgaattttacataattttgatgtgttacaaaatactactggg

SEQ ID NO: 57 - DNA, 522 bp, Homo sapiens
tagggtttggccatgttggccaggctggtttcaaactcctgacctcaagtgatctacccacctcggcttcccaaagtgctgattawagctgtgamccaccatgcccggccaggaaaycttactgtagaacaattttttatatagctgtataaaatgtatatgattgtcytgacagtctcaaatactgtttttaatacttgtwaatgtwatctcaagtgcttaraacagttccttacatataagttgctctgtagtttgctcttatagttagcccaaagactctgggtgtgaggcctgctgtaaaccaatgttaaactgcttattagaaagccctaaccacctgctttgtaggcaccagaaactcaaaaccaaatctcaactcagctacagaatctactgtggtccttgtctgaaaaaattagttcactcggttggaatcttgtctcagagcatcctcatctctttctcaaaagcccctaaccccaacaccggcgtgttggttgtctattgaaacttaacaag

SEQ ID NO: 58 - DNA, 626 bp, Homo sapiens
  SITE (2): n equals a,t,g, or c
  SITE (15): n equals a,t,g, or c
tnaatttaaatttanaaaaggagacgggggggataggattcagttaattggatggcatggaaatcaaagcacttggaatttttggaagtgtgtttaaaaatttagtaaagaatgcctaacaattacaaaaggtatgagattgtctttttgagtttagtagaatataaactgaygacaraagactgacaggcaccaaataagtagagtgtaaaacaacaacaaaaaaaagaaagataaattcaggtaatgatattcaagcagtatgactgcataagattgcataagaaagaatacatttccaaatccaaaacaatatcatcctgttgtattatatgcatatattgaatacaataacaaaagtatcaagagttcttattaaagcacccattatcatttatgtaaaatattgcaagactttaaagtcacagaacaaaacatattttttccccattatcttttttgagatgatcacatttcttcacactttgtgaactgcgtagttaagatggagcaatgatttgaactatttgcaaatgcagttccttccccactctttatatactgtttgggccatgaatctatggaaagaggtgttttacaagaacgaaagtcacatcattcaggac

SEQ ID NO: 59 - DNA, 824 bp, Homo sapiens
  SITE (784): n equals a,t,g, or c
  SITE (806): n equals a,t,g, or c
  SITE (811): n equals a,t,g, or c
  SITE (813): n equals a,t,g, or c
gcagctttttgcactaaagccaaaccacaccgctgtccccttagccccaagggccctgggggcagccaccctcccgcctgttggagaggggactcccccactcgcacttaactcaacggctctcgggccctggggctgtttttaccatgtttgtttttgaagctcaggtgtctcacgtctgggctgcaccargcgaagagrgaaattaaagatttgaggtttttccagaagctttgtctgcctctcgggaggaaggccgtggggctgggaccctgtggtgggcaagtgggtggagtctggcagctgcccacagagggccgagggtcacccgtcggccgccgccaccccaggcgaggccggagaaggatcatctgagacgcaggaggcatctgctggagcagcaatttcccaatttattgaaagtgatcgctttgaaggatgtctaagctaatcccgtcacagaaaggaaacgcacaggcgcctaggcagaaacttggagactcaccgcagaggccacgtgaacccacggccacagagaggcaggacggcagagccatgatttcccaccgagcgattacgagaacctcttcccccaatagtagacacatctccaatacaaacacaggtttataataagtaataggaagtcaatataatatagattatccccagaaaaaaatcaacaatcttcaaacactgccctttttttgtgtgttttgtttttgttgacaggttgaaagcatgttgaaaaaattaatttttaggaaagcacacacgcaccctnattccagtagttcttaaagggntggcntncaaacacattt

SEQ ID NO: 60 - DNA, 848 bp, Homo sapiens
gcagccaccagagattgacaagaaaaatgaaaagtttcttcaggattgaatgaaaacctcactgtcaatggaggaggctggaatgaaaagtctgtaaaactctcctcacagatcagtgcaggtgaggagaagtggaactccgtttcacctgcttctgcaggaaagaggaaaactgagccatctgcctggagtcaagacactggagatgctaatacaaatggaaaagactggggaaggagttggagtgaccgttcaatattttctggcattgggtctactgctgagccagtttctcagtctaccacttctgattatcagtgggatgttagccgtaatcaaccctatatcgatgatgaatggtctgggttaagtatgtccttttaaaaattatcagttattttttttcagagttttctttctagcaccctgaattcatgctttatgttttaattttaattctaatttctcacctttaaaggtcataagaatataatttaataccaaatgtactacttgaaacctgattattgaatacctgtagaattaaaactgaattttcgtaattgaggcaatatttaaacaaagttttcttctagttgctctgtagtatttctagtttttaaattttttgttttaaatgaatgtctgtttctcctcctaggtagtataatagactgaattaaatatacagaaatggctttgtatttgtgaagtatacacacatttttgtgccggtagaaaactactttcttaacccagttgccagtagaagtttagttaaaggaagacattttagaagggaagaatatggtttgtatgttcggaaagctcatgccgtcttccattta

SEQ ID NO: 61 - DNA, 694 bp, Homo sapiens
  SITE (525): n equals a,t,g, or c
  SITE (543): n equals a,t,g, or c
  SITE (575): n equals a,t,g, or c
  SITE (635): n equals a,t,g, or c
  SITE (652): n equals a,t,g, or c
  SITE (663): n equals a,t,g, or c
gatcaaatctaagaggtgctggaatgttggagaaggtccccgccttggtctaaggtccccatcccagatcctgtcactgaggggctctcacccccgtcccacccctgccccagcaggcagragcctcytgggaggtaggaagcagcagccttgtgggagcagaccctccagaccctcaaagaccaccccaggcatgtggcttcagcacccatgcccagcatccacttccgcctggggccccgaaacatagggattcctggaagagttgtctggtcctaggtcattccctcccatcgtcttctagaaacagcttcaggggtagatgctgcatccaccctaccaagccagcctaggcagaatgcagaaggtgcctgctgcacacagcttcttctcccaggctccgcctccacagactccttcaggatccccaggtttatgtcttcccgccctcagctccacatggaccacaagcaggctgtgtcgtggaaaaaccaggcttgggagtcagaaagacctgattcaaantctggctggggttacttnccaactattgtaagctttgggcaactttcttnaccttctctgaagcctcaatatctttatcaagtaaaagtgggggaataattaacaacctntttccctttaccaaggngaatccgtgtnggaccaaaaacgacgcccaaagtcaagggct

SEQ ID NO: 62 - DNA, 743 bp, Homo sapiens
  SITE (468): n equals a,t,g, or c
  SITE (632): n equals a,t,g, or c
  SITE (694): n equals a,t,g, or c
  SITE (703): n equals a,t,g, or c
  SITE (715): n equals a,t,g, or c
  SITE (724): n equals a,t,g, or c
  SITE (729): n equals a,t,g, or c
tgggcagtccattctagaaggttgatgaatttccctaccactctcctggggaccttttctctctagtgggaacaaatgctacataatttagtcaagatcctattaagtcatctcacctgaggcatctggagagggagttgccttccattggtgggaaattgttggtgccagaatacattttgcccaaaactcttctcattggctggccacctagcagggctcctctaaacacgcaactcagcgaggggacccccttcacctctggcaagagagctgggtagatcagaaacttggtgacacctggctagcacagagcaggctcacttgtcttggtcccactacccagattcctgcagacattgcaaaccaaatgaaggttgttgaatgacccctgtccccagccacttgttttgttatcatctgctctgcagtggaatgcctgtgtgtttgagttcactctgcatctgnatatttgagtatagaaaccgagtcaagtgatcatgtgcatccagacacactgtgacacctgagccacagagcaaatcaccttaacgatctggaatgaaactgtgaccaagtgccgcctgggtgggtctggagagctgccgcttcttgtttggcatagtgctggngcccggttaatcactgctagacagagtccatagagataccatctcatgcctctgcgcttgtnatgaaaaantgtctctttctnctgatatgntcatntgctataagtcatc

SEQ ID NO: 63 - DNA, 537 bp, Homo sapiens
  SITE (459): n equals a,t,g, or c
  SITE (526): n equals a,t,g, or c
  SITE (535): n equals a,t,g, or c
aaaaatctatgagtttattccacctttcatccattgcatttgtgatgttattagttagcaagatggacactgttctttagaaaggacttatttaatattaaccacgtcatagagcaagatggcccccagtccctacaagcaagtgcaattaaaaataaaagcaaatgttactgagccctgctgaactcctgataaaaaaaattatgtttatggtacatataaatgtctcaatcatgcaaattgtcactcttgttaatgaaacaattttgtaaaaagatagtcctctaaaagggtttaatgttttttacctatctaactgtctaattagatttacacatcccgcarggcaggggagcctgragcttttccaaaccaaatcgtttgccactrgaaactattttcagctcttcatgatttattaggaaatagtttaacccggactgtagtgtcttataaaanacaaaacgagaaaactgacacaccaaaatgaagtctgtgaaattgtcatcctcttaatattacctgnatttaaatnat

SEQ ID NO: 64 - DNA, 460 bp, Homo sapiens
  SITE (377): n equals a,t,g, or c
  SITE (430): n equals a,t,g, or c
  SITE (457): n equals a,t,g, or c
taggcaccagagaaatggagatggaaaggaagatctaaatcagaaggcttgggatattcagatgctatttttttcaagagatcgtcaaaagtacctaaatgaaccaaactatgaggctctgattagtattcagattggaataatggaacaaaccattgctgttttagataagatgcacaaaaagaatgtggaaaactgcaagaaactactcaaaaaacttggaaagttcagcaatcaaaaagrtatagcaaattatgccctaagctgcaatctacgagaagagttggtagctgtctcagagagaaaagacatctgtaatgcaatggggtctaaactgacttgtgaaaagattgtcaaagaacggtatgaaaacatgntgcaacagcagaagttaacaaatgtttcagaaccacaagctgaaccaggtttnaatactaccagacctgaagttgaaagnttt

SEQ ID NO: 65 - DNA, 485 bp, Homo sapiens
  SITE (313): n equals a,t,g, or c
ctctggaggctgaggcaggagaatctcttaaacccgggaggcagaggttgcagtgagccaagaccattgcactccagcctgggcaacaagagcgagactccgtctcaaaaaaatacaaaaaatcatctgggctggtggtgaacgcctgtaatcccagttactcaggaggctaaaccacaagaatcacttgaacctgggaggcagagkttgcagtgagcaaactccactccacgtcactgcactccagcctgggtaacagagcgaggctctgtctcaaaaacaacaactacaacaaaaaagataggacagtagnttttattagaccctgaagcatactggaggctttttcatttctgsattccctgacagtgctccatagagtaggtcttcaaaggtagatagtaatctcattaccctggactgttctcataatgtaacagatcactaacactgaatcttaaaaataaagttcttttagtaatttt

SEQ ID NO: 66 - DNA, 583 bp, Homo sapiens
  SITE (545): n equals a,t,g, or c
  SITE (560): n equals a,t,g, or c
  SITE (568): n equals a,t,g, or c
  SITE (569): n equals a,t,g, or c
gaaaggctatgtggaagaaaaactaaatctttgagggcagatttaagaatctcagagaagctctgaaaaagtaagtgtgtgtcgttttgtcgctgttatttttaaaatcatagacctgcattgcagaggcattcacgtgccgcccccagccagagcaggaggtctttctgtctgtctgttcgtctgtctacccacaagacccctagatttcctggaccccaatggtggagtcctccatggtctgccagagaaactccagagtttgctagcatttcctgagagaagcacaggaatactgctgggatccctgaaagcatagtagctgtgatgataatagtagtggtgccagatttctcgattctaaaatgcacgttttcttttcacattttaataattctgacatcaggagacgtcttaacgtcagttttgtttatttaacacaattgtgtttcctttttcactccagaattcatcatcaaaatgtttgcattttataaacaatggcatccgggaattaaaaaaatacagtttacaataatcataanaaaaaaaaaaaaaantgaccctnnagggggggccccgg

SEQ ID NO: 67 - DNA, 244 bp, Homo sapiens
tcaataattttgtatgcccttcatacagtctttttgggattggcctttttcacttcccatggttctctggttgttgagtttatcaatactgtagtttattcctttttgtggttgatacagacttctatactatgatctggatatgccacagttagtttaactgttcacccactgtagaacatctggtttgtttcctgttttcacttttgtgaataaagctgctaataaatattcatgtcgaggg

SEQ ID NO: 68 - DNA, 341 bp, Homo sapiens
caacagtggaactgttttagttccactaaagaaatggttctcaaatgttatatcaaaatcacttgaagcacttatttctagccctacccaagacctgaactcctcagaagatatcaaaagcatctcatttttaactggctaccattacgtttctgatacatacccatattttgaaaataaagctctaaagagccagaatttgaaagtaaaaaactatcttatgcaggtttcttatacaggtttagcatccctaattcaaaaatttcaaatccataatgctccaaaatctgaaactttttgagtgccgatatgatgccgtaagtgggagattccacacctgc

SEQ ID NO: 69 - DNA, 454 bp, Homo sapiens
  SITE (423): n equals a,t,g, or c
ctgccaccccagtatttcagttcagaaacctctggttcctgtgctctcaatcctgaggaggtcctagagcagccacaacccctcagctttggccacctggagggctcgagacagggttcacaaagtgtcccagcagagcaagaatcctttgcactccattccagtgatttcttgcctccaataaggggtcacttgggatctcaacctgagcaggctcagcccccttgctactatggcattggtgggctttggagacatcgggacargaagccactgaatccgccaaacaagagtttcagcacttttcgcctccttcaggggcccmaggaatycctamctcttamtcagsttattacaatatttctgtggccaaggcagagctgctgaacaaactgaaagaccaacctgagatggcagagattngcctaggagaggaggaagttgaccatgaact

SEQ ID NO: 70 - DNA, 591 bp, Homo sapiens
  SITE (31): n equals a,t,g, or c
  SITE (352): n equals a,t,g, or c
  SITE (564): n equals a,t,g, or c
  SITE (576): n equals a,t,g, or c
cgatcctccaggccctgagaacctgtttgtnaactacctgtcccgcatccatcgtgaggaggacttccagttcatcctcaagggtatagcccggctgctgtccaaccccctgctccagacctacctgcctaactccaccaagaagatccagttccaccaggagctgctagttctcttctggaagctctgcgacttcaacaagaaattcctcttcttcgtgctgaagagcagcgacgtcctagacatccttgtccccatcctcttcttcctcaacgatgcccgggscgatcagtctcgggtgggsctgatgcacattggtgtcttcatcttgctgcttctgagcggggagcgnaacttcggggtgcggctgaacaaaccctactcaatccgcgtgcccatggacatcccagtcttcacagggacccacgccgacctgctcattgtgggtgttccacaagatcatcaccagcgggcaccagcggtttgcaggccctctttcgaattgcctggttcaccattcgtgggttcaacgtgttcccccttaacttcaaggaggctgttccntgggtgaaccgncaacaagtttgctgg

SEQ ID NO: 71 - DNA, 437 bp, Homo sapiens
  SITE (418): n equals a,t,g, or c
  SITE (437): n equals a,t,g, or c
tgaacttcaggatacaactggagatattgtggaagggaaggtcaacaaaggcatttacctgaaagaggaaaagggagtcacgcttctctattacggcaggtacaacagctcctgcatcagcaagccagagcagtgtggccctgaaggggtcacgttttcttttttctggaagacacaaggagaacagtctagaccaatcccttctgcgtatgggggacaggtcatctccaatgggttcaaagtctgctccagcggtggcagaggctctgtggagctgtacacgcgggacaattccatgacatgggaggcctccttcagccccccaggcccctattggactcatgtcctatttacatggaaatccaaggagggctgaaagtctacgtcaacgggaccctgagcacctctgatccgagtngaaaagtgtctcgtgactn

SEQ ID NO: 72 - DNA, 616 bp, Homo sapiens
ttatgattaacagtatcccctgaggcctcccgcccaccctcaccgcggctccatctccagattcttccccagccactcctggctgcttcctcctcaggtgccgccaccttacggagctgaactcggtcacctgacgcttcagcaagcaggggcttgtcctgaagctggggccgcgggcggcagggtgctcagagccagttcatcctgccctaggatgccaccttggtcctcagcagtcacaggaccactgggtctgaagaacttccccatggcacggacctgcggcagctcagagaaggtctccactgccagcagcatggcmaagagtcctagaagcaagtaacctggggaggagaaggtgctggggcagcgcctgggttcwggtgatgctccccgcccacctcccagcgcagtgacttgccctggcaactggcaccactcacccccttctcaacgctgccaccagagctcttcgactacccctcccacgccgtgccctggagtgaggtccctccacctgcaaggcccagccccccagtgatttatgggagtcctagtccaggctcctcttcccccttcccccacacgctgttaggtggctggacttaccaagaag

SEQ ID NO: 73 - DNA, 1393 bp, Homo sapiens
ggcacgaggaacacttgaaaactcctcaccaactatttttaaaggcttactttgtttttgtttttattttttcactggctattttggataagaggatgtttacatcttaatgtaaaaaaatgaaaacaggtataaatgttttatgtatagaaatgttttctttcattatttggtgcctgtatctccgtgtttatatcatttccccacctgtatcatgctgccaaaaaaagaactttgaatttagaaaaagaaattggtgtaaagtccgggccgggcacggtgggctcatgcctgtaatcccagcactttggggagctcaaggtgggtggatcacgaggtcaggagtttgagaccagcctggtcaacatagtgaaaccccgtctctactaaaaataccagaaaaataagctgggcgtggtggcaggcgcctatagtaccagctgcttgggaggctgaggcagaagaatcactttaggcctccatggtgtatgatcttctgtttctattgcacttctaagagcaagcctgagtttacctcctcactctaagggggaggacacagaggtgatcagatggtaatggcttagccagttcacatagctaagcacacacaaccctgatctagtgcagggctcttcgcactagcatggaactagtgaaggtgaccagtgttatattcagggaatatgactgttcttggtaaagccaaggagttgaggggttctgaaattggtgagtccaggcctgctgctggagtattttatcctaataggtgtattttattttaatttagataattcctaaatactgctttttgattaaggtgtaccatgagagcgaagataccctcttttatatactaagataattgcaatatttgcttgcttttttcagtctgtatttgaaatatatttacattaatacctggcctctttcccaaaagcacttgaagcagcataccaagaaaagacatatacagccatgttaatgaaatatgaacagaaagggaagaaaaacaaatgaaaattgaagggagggtttacatacattattgtatgtaaaatttgactctggaactttctggaaatcaaggctaagggtagggaaagaagttatgcactgccctatcaggtgaaaagcataccagttccttaggggagagcctttcctgatgccttctagtaaaggtgttctcactgggggtcctgtgaagtgctaaaatgaacagaattctcgattttcacacatttacatgttatgattgtgccttggatccttaccttgtaccagctttcaaaggcttccatttcaggatttggggggatttgtgtaggtgtggttaataaaggattttgttttcataggtaagaatcctaaaaaaaaaaaaaaaaaa

SEQ ID NO: 74 - DNA, 631 bp, Homo sapiens
  SITE (80): n equals a,t,g, or c
  SITE (83): n equals a,t,g, or c
atcattttaggtttggaggccatttcaattcaatatgtatgtgttttatgtgtttaattcgtatttactatatattaaangantttccaaatagctcagataagaaaactttggtttaaaattgagttattttataagctacatagaatacatcaaaattttataagctgcatagaataggctttaaaatatcagaattaggaaaataaaatatagatggtaaaaattcaaatatttatcaagactttttcactaatgatggggtaaagaatttttaaatggataatataaaacagacagttcaaaaattatttttggaaaatatatgcatcgggaaacataccccacacggtgccatggtttaattattccccagctctacttttgggagcctggaacttgtcagggttgtgaaatagatctcagactattaaggacattcagaaactggctaagccattcaaggaaaatcaggaatttacgtaatatattggactacagtctcaaaggacagagagaaaatcagtcaaatgggttttgatatttttttttcctagaaatgtgtagcaaatgtgattttacaaagcagctacaaatacaactatctctctggrattgaaaatgtgtgaaa

SEQ ID NO: 75 - DNA, 610 bp, Homo sapiens
gcatactgaatcagcaggactggctggtggtgcagcagacatcatgagtaagcaccgagaagtctgttccttatcacgtgtgtaaggggaaaaaggtttaaacaagtctcttaagtggtgtttcctcaccgatggagaattacttccaagcagaagcttacaacctgggacaaggtgttagatgaatttgaacaaaacgaagatgaaacagtttcttctactttattggatacaaagtggaataagattctagatcccccttctcaccggctgtcatttaaccctactttggccagtgtgaatgaatctgcagtttctaatgagtcacaaccacaactgaaagtcttctccctggctcattcagctcccctgaccacagaggaagaggatcactgtgctaatggacaggactgtaatctaaatccagagattgccacaatgtggattgatgaaaatgctgttgcagaagaccagttaattaagagaaactatagttgggatgatcaatgcagtgctgttgaagtgggagagaagaaatgtggaacctggcttgtctgccagatgagaagaakgtcctgrtgtagccgtcatgcatactgtgataaaggac

SEQ ID NO: 76 - DNA, 870 bp, Homo sapiens
  SITE (713): n equals a,t,g, or c
  SITE (846): n equals a,t,g, or c
  SITE (866): n equals a,t,g, or c
ttagcaaagcatatgtatttctcaatgagtaaaatggggataataacgtctattgatgtagagggtcaaatgaagaacaaatagtagctgctgctacttgactggaaaggtaaatgtgtttacatcatgctgtggaacactctaaacagtctatgtagaagaggggcatgttctcatgggcttctcatggtaattgtgaatgaagccctttgttaaggtcttgttgaagaaagaacactgtataagttcaggctttagtacattttccttagcaaaatgttggtaagtgaatcaaagagttgatttttccaggtttccagtttttactttagtttatgttgtgcctgtcttggactttctgtttagtttggatggaaaatacctgcttgaaattttaaaaatgatttcyttagtgcatcyatttagctagtttctgataggtggtatgtaatattttccctttttctttccttctgtagacacaataagtcattctccctcttcttttttyctttttctatttycttattctttactctaacctgcttcagagaaagagccctcttccttcttgtcttcawcttagtcttttcaaaataaaagatgactgtgagaaccccaagaacttccacttctgggaggcagccacaggacagggaacatatttatttgggtctcttcagttccccctttgagaacaacattaaatacangttagctggggctccagggcattctccttccacagtagtgcggccaaawtcccagtckggccagtctctttgttgagactgaatargaaggackgcaggtttttttggagggakgagataatttttccctcgnagggcattttttccccttgncctt

SEQ ID NO: 77 - DNA, 287 bp, Homo sapiens
  SITE (283): n equals a,t,g, or c
ttttttttttttttttataggtatatatatatttttttgccttgsagggagaaactcatatcattttttgcaatcataaaaataagcaaaataaaataaaaacatttcatgctcattaaacaaattttagccaatagagaatagtggaaaaccaaacagccaaaatcttatcaataaaaccacctctgtttagtattttgagagaattattattatatttttggcgatggggtttcactatgttgcttaggctggacttcaactcctgggctcaagcgatccntttg

SEQ ID NO: 78 - DNA, 549 bp, Homo sapiens
gtcttgagtgaagatgaaaatgacaagaagcaaaatgcccagtcttcggacgagtcctttgagccttacccagaaaggaaagtctctggtaagaagagtgaaagcaaagaagccaagaagtctgaagaaccaagaattcggaagaagccgggacccaagcccggatggaagaagaagcttcgttgtgagaggtgatgcctgcaacgcgaggctcgccctgcctgtcggggccggggctccatgcatgctcttcattgcagggaggagcttcccaccatctacaagtgtccttaccagggctgcacggccgtgtaccgaggcgctgacggcatgaaggtgagcactggctgtgcctgacccaggcccggcagctgtcagtgtgaacctgggggaggtagcaggtgtttctgcagcctaactcagacttgtgcccaaggacactttgacctaggttaacccgagaccttgaagcagtcctagccagtgccatccttgggggtagatgtgaggccagactttcacttgagacaccccccggggggttctaga

SEQ ID NO: 79 - DNA, 818 bp, Homo sapiens
  SITE (5): n equals a,t,g, or c
  SITE (15): n equals a,t,g, or c
cgaanttcggagcgnccggtactgttgaaagcgagacatcaccagatagagataagaaaaaagagcagtcagaagtatctgtttctcctagagcttcaaaacatcattattcaagatcacgatcaaggtcaagagaaagaaaaccgaaagtcagataatgaaggaagaaaacacaggagccggagcagaagcaaagagggaagaagacatgaatccaaagataaatcctctaagaaacataagtctgaggaacataatgacaaagaacattcttctgataaaggaagagagcgactaaattcatctgaaaatggtgaggacaggcacaaacgcaaagaaagaaagtcatcaagaggcagaagtcactcaagatctaggtctcgtgaaagacgccatcgtagtagaagcagggagcggaagaagtctcgatccaggagtagggagcggaagaaatcgagatccagaagcagagaggaagaaatcgagatccagaagcagggaaagaaaacggcggatcaggtctcgttcccgctcaagatcaagacacaggcataggactagaagcaggagtaggacaaggagtaggagtcgagatagaaagaagagaattgaaaagccgagaagatttagcagaaagtttaagccggactccaagtccacctcccttcagaggcagaaacacagcaatggatgcacaggaagcttttagctaagaagagaaagaccgggggtctcccttattgtttgcccaggctgggtaacacagtgtaacctgatgttgcttcccctgggaacccagcctgacagaaaactgcagc

SEQ ID NO: 80 - DNA, 596 bp, Homo sapiens
  SITE (513): n equals a,t,g, or c
  SITE (568): n equals a,t,g, or c
  SITE (584): n equals a,t,g, or c
taatacgggttaaagtgcttgattattcaaatgggatatttcaaaaatagtggctttcttgttttcaggttgtgagcatggggaaaaaaaaccggaaacaaaacaggaacggaatcagcagcaacattaaggcagtgagccattttacaggaagaatgagcacagggcaggaataaatgctatttttacttttgatttgtggctatcacagtgtattaaaggttcttaacaaactgctgttttctccgcttacgttactaggaaatgtagagatggmamagaaagcccagggtgcagttcttatctaatatttgtaaccctgtgaagtaggtgctgttatatattttatatgtgagggaacatgattttagaggttaagttacttgcacaggatcacatggataagtatgcatgtgaattggttgtgactgaggacatttaagcmaattaacayctgtgcttagaattaagattctgataggatccgtaaactacattttaaaaggactcgangggaataagtgaaaggatatgagtccattaaggaataaagatcccttaaggtgcnccataaccaaaaaccnaattttttaggc

SEQ ID NO: 81 - DNA, 498 bp, Homo sapiens
aggctctggggagtgagtatgaggaaagagcaaacgtgggtgacgctgtcagggagtgaaaggatggaatgaggtgaggcgctagtttgagtagtttgaggccaaagcagggtggaaggacggcggtggtggtttttataggatcaaacagattttgacaaaatgaaacaaaagctatctgacaaaagggtagattgaataaatatgctggatatgtacacaggttaaagtgtttccatcacatgcagccagttcctgcttagttccatgtgagttaggcactgtgagggacggtcggtggcagagttttaattccaggcgagtacagcagccgggctgcttcctctattgctcaactgatgtgtgttcagaggatccaaactcatttcactgtcattctaaggaaaacatcatggacaatgtaaattttattctctttctaccctgtttaaaaaaactaaaaaaaaaacctaaaaaaaaaaaaaaagtcctccaaaa

SEQ ID NO: 82 - DNA, 523 bp, Homo sapiens
  SITE (493): n equals a,t,g, or c
gatttccatggctaactagatttaaccagaatcccgccttccaggctcctgttcccttttattagctgctgaattttattcccttttcccaactccaggtccctcagttgtcttatatctaaatcctttgccaggtccccacaatcccagcacctgcctctgtgagctgcccccaggccctcaccttggccctggcagcctcctgtgctcctgctgtctgaaggactggcccctcccccactgctgaagccacacgtacagatcctaagcaacagggccttttgctgggacgtatgcctggattatggccaaccgggaagagagagatgtatcttaaaaagtggaggtggacttctcctacagctctgacggtaacttaaattgttgccagcttggaggcaagacaagggaatcatctagttaggggtaaccattaatttattttaaaaaaggaaatgctgaaagtccgtattaagtactgagtttagttggnaaattttagataagtaaggatccttttagg

SEQ ID NO: 83 - DNA, 653 bp, Homo sapiens
ccaaaatgaaatatgttgtgactaatagatacagtttatttgaatgaatgatagtttttcccatttgatattttaactgtgctacacaagaatgagagtagacatagctcgatttgtagtctcattgttctgtcttttctgcccatttcagtgacccaggactctttgtttattgctgtgatttttcttccacagctatagaactggtccaggtgagtacgatgggaaattacctatkggtaatttccactgattaaagggaaaaggttctcctaaaaatcaaggtctctggctgtgttcttatacggtctgtgttcttacggtctaaaagtaaaagatttactgataacgagcataccttgttttattgcagttcactttatcacactgtacagatgtcatatctgtycatatattgaaagtctgtggcaaccctgcatcaagcaagcctaccagtgccgtttctccaccaccatatgctcacttagtgtctgtgtgtcatgctttggtgattctcagaatatttcagacttttttactattatgtatgttatagtgtgtgacgttactgttgtacttggtttggggttccacaaatcacatctgtgtaagacggtcaacttaataaatgcatgtgttgtgactgccccacc

SEQ ID NO: 84 - DNA, 423 bp, Homo sapiens
  SITE (242): n equals a,t,g, or c
  SITE (266): n equals a,t,g, or c
  SITE (375): n equals a,t,g, or c
  SITE (399): n equals a,t,g, or c
aggaaatgagacaaccttttcctcccactgactcgggctcctgcagcttctgcggggcttggcgccgccgtccgtgagcacccaggccgggaccccacatccccaggccagccctgaccccggcggcccctccgccgggattcctttccgaggtactggtgccggcccaagaccggggcagcgctttgtcgtgtccgcccctcagtgatcagctccgggtccccctgctcggccccgcgcgncccaagcgcagtccccggaagtgngcgcggggccccagcaaagagtctgagaagccaaatggggccaaacaagttttagaaactctactggctgatgcaacatcatcagagatgaactgttcttaacagaaanttctctgttctgacaacccaactnttcccaggaaaatttgcagacaga

SEQ ID NO: 85 - DNA, 602 bp, Homo sapiens
tttttttttttcaatttttaaaatttaatttataaagaaactctatatcccattgtaaatgaaaaaaagcagtatcacttgccataaatagagagtaacaaaaataaacacaacaagctgtacaatggtattaaagcctagctggagactattgtctcctcaagctctgggcttcctgccttccctttccgttgataaggaagcttagcaaatgttagagagacgtgaaagacacagtagtaccaaaccaagacttgctcctgggtgcagttcatagaattgaaaggccactgcaaaccagtcctcttccggggtgacttgatgacttgatggtgctcagtgctgtgtttgggatgtgactcaaatccacttatttgtcagcagagtcccacactcctggaagccctggcccagacgacctgctttagctcccgcaaggtgtctcagattgtcgtgttgagtagggaatggagggggtcacaggtgcccatgcccaggtgcagcagagagggggagaccggtcccagagcagcccatcagccagatgagtccccctgcgccagcgtggrcctgtcggggaatgcagctgactgggccactgc

SEQ ID NO: 86 - DNA, 822 bp, Homo sapiens
  SITE (516): n equals a,t,g, or c
  SITE (520): n equals a,t,g, or c
aatctctgttctcacaaagtctccccaatgctctacaagcaactgcgtcaggcctgtgaagaccacgtccaggcacagatccttccgtttagagaagactcactagatagtgttttatttttaaagaagattaacacgtgctggcaggaccactgcagacaaatgatcatgatcagaagcatcttcctgttcttggaccgcacctatgtgctgcagaactccacgctgccctccatctgccaaaatcattaacgtgaacgtaggagtccaggtgggtcttagccttgamacaccaggtgtctagccagcagcaaggagtggagcaggaagctcggacaggcggctgactttggtcatgagggtgaagacagagggtcttggtttctctctgacgactggaggttgarcctggagcggctctttccagcgctgcagttgaaactcggagaaagactgcctgctgcccttggggtccgcagccctgaaggctgtgcgtcccctgtggaatggcttgcntcangtcccggcctcctgagcacatagcactcatcgtccgtcatctttcggggactgtatacaccaggggttctggggcctttcctcagcagcgttcgcggccacggaccccacatgtcctctgctgacccctgtgtgtcctctgtggccaccccatggcgctgaatcctgccgcctcctgcaagccgactttggacaaaagctgtgtccggtctcaccgtctgatttgtcttgttctctgttaatgtagtgtttcattcttctcacattcatacataaaagtgatgtcgtgccttctcatgaaaa

SEQ ID NO: 87 - DNA, 355 bp, Homo sapiens
  SITE (327): n equals a,t,g, or c
  SITE (328): n equals a,t,g, or c
aaaattgttgtgagctctggaggcccccagggttggtggagatggtgttccttccaagttgcttcctaaagtacaaaaccccatgtcctgttaaggttgtggcttctactcgaaatgggccacccctgtcaggtttccctgggaggaactggccagcctgcctccctcctgggtaacgcatgctcttggggtcggggaccccggggggtgcctgacagggtgtctcctgcttccttgtcctcccagatggagacctcacagacacggtcagtggtccccgctccacagcctccgacctgaccagcagcaaggcctccaccaggagcnncacccagcgccagaaccccttcaacga

SEQ ID NO: 88 - DNA, 435 bp, Homo sapiens
  SITE (321): n equals a,t,g, or c
tttttttttaatgtttaactttttattaagaaactaaggcaaaacaacagaattccaaaaaataaagatacagaattctaatttaaattctaaacaaatataaaaatcagagtttaccagtatttttgagtagaggggagtggctaaatgcattcacagtaattatttcttccttaccagcctcaagtttgcaaccctttccttcctgcttcactgggactagaacagaatttctcattcatcttttgctactataatttttgcttctatagtctaaaacttcagaggagcttttgtctttctccgcagttctttctctgntccttcagcaaatatgtgagcacctgcctattgggcttacatgttgtgggcacaaagatgagtccgttagagatcctggtcccagtttagggggcgatatgacaccaataaata

SEQ ID NO: 89 - DNA, 374 bp, Homo sapiens
aaagcagcatgtcggagggcagactatatggaggggaactgggtgaattctgagccactctggcctgagttaaaatcttctaaaggcagatcagtatcttgtttgagcccaaaagagtcctttgataatttaccatgttattatgcttattgtacacatttcctctttctctcagcaaacctagagtactatacatacattattgatttatctttatcatgttcaaatgaaaggcctggtgagtgaattgccttaacagactttacaaaatgaaaaattattaatgtgaatatattagtgaagtgcagragcttcacttaaaaagtagagctgttagctttcctaragagatactaggagaaaaccacagtagg

SEQ ID NO: 90 - DNA, 442 bp, Homo sapiens
  SITE (440): n equals a,t,g, or c
atcccttgagcctctggaggtggaggttgcagtgagctgtgattgcgccactgcactccagcctgggcgacagagtgagaccctgtcagaaaacaaaacaaaacaaaagaattctgtaagaacttctaacaggtacattcctgtaagcattacccaccactggactaggcactgggtagcctgtaaaatacagtaagagctgtctctgcacccagaaaatttaccatcattttgtgctggaaagacatgccctagaaaacaataaacagcacgactgtacatgattccatgccaaatgactgctaggaattattttattaatccattcaacaaatacttattgagtaaccactattagccagccaccgttttccgtgtgaggacataaaaatgagtgagacaaggtctctgccatcaaaaaacgaacagatcagtgaggnaa

SEQ ID NO: 91 - DNA, 493 bp, Homo sapiens
  SITE (32): n equals a,t,g, or c
  SITE (471): n equals a,t,g, or c
ggtgctggaaatggagaaggaggctgaccaanaggacccacagctctgcaatgacttggaattatgtgatgaggccatggcctcctggatgaggtcatcatgtgtaccttccakcagtctgtctactacctcaccaagactctctattcaacgctgcctgctctcctggatagtaaccctttcacagctggtgcagarctgccggggcctggcgcggactgggggccatgctccaggattgagacctaccctgggcgtgttccaggcagccttggagctgaccagccagtgcgagctgcaccctgacctcgtgtctcagacttttggctacttgttcttcttctccaacgcatcccttctcaactcgctgatggaacgaggtcaaggccggcctttctatcaatggtcccgagctgttcaaatccgaaccaacctgggacctcgtcttggactggctacagggagctgggntgggcgacattgccactgagtt

SEQ ID NO: 92 - DNA, 562 bp, Homo sapiens
  SITE (500): n equals a,t,g, or c
  SITE (515): n equals a,t,g, or c
  SITE (523): n equals a,t,g, or c
  SITE (557): n equals a,t,g, or c
aaaaaaaaaaaaaaaagagagagacaacaatgagacagattggcacatgtatgccctgagaaataaatcaacagctcccattaaaattctcaatacgctagacagatttaaaagtacaatctggtactttctcttttttgagmtggagtctcaccctgtcggccaggctggagtgcaatgcacgatctggctcactgcaacctctgcctccccggttcaagcgattcccccgcctcagcctcccgagtagctgggatcacaggcatgcaacaccacgctcggctagttttttatatctttagtagagatgggggtttcaccatgttggccaggctggtcttgaactcctgacctcatgatccgctagcctccgcctcccaaagtgctgggattacaggtgtgggccgctacacctgggccccaatctggtactttcaatgttgcctataaacagatttcagctgaagctcagatggtaaggttaagatgcctgggggatngggatggatgggatnggcagganggttggaagagaagtaaatccaatttagcattgnaaaat

SEQ ID NO: 93 - DNA, 729 bp, Homo sapiens
  SITE (683): n equals a,t,g, or c
  SITE (694): n equals a,t,g, or c
  SITE (705): n equals a,t,g, or c
ccaggttctgaataaaaaaattaattgatacaattgatgtgtgctggggtttggaactaaaagtagtttcaacagtgcgtgggttatgacatttcttatgtttctttgttcatgtgtgtatttagtagttaattttaagatgtcctagtgatctttaaaagaaaaatattgtaccattttttagaattacactttcacctttctttttgcaattgaaagtgatgatgtcaaagtgggatttctgtactycaaggccccacccccaatttagcaagcagaaaaacgttccttgtatcactttaccttggataattgggtgccattaacacaaacaggtcacaatcytgctgttttctagccctgtccaccataatgagattcaggaaacatcctgtcagcctcckggaaagcatccttgtctccttagtatttcatttacaaactacctcttaacagagactgcttttcaaattggccaatcttacctgttttgtgttgtgattgcattttcaaagagtaattattttcagcatatacagttttgaaacctgtagctcctatgcaataacatagttctatagacattatttgggggaaatgtaggtaataactcaatctatgttgctgtcctagaaaggraattgcatgatgaatctaggattgtctttaggagtaaaggaacncattcaaattnccgttaacttnttcactttcagtgaggtaaattta

SEQ ID NO: 94 - DNA, 640 bp, Homo sapiens
  SITE (15): n equals a,t,g, or c
  SITE (33): n equals a,t,g, or c
ttagccatcctaaanccttcctgaacccccccngcctaaaaacactttcccactaacacccacactgtcctccctgaaaacgaactccacaggggcggggtggggaatgggggcggacgactcatgcctcagagaggcactgttcttcttgggctgccctggggtgggctaagctggacagagggagagaagcagggaggaggagagatttgagttagtatctaccatgatttctactcaagaatgtggctagtgctgttgtagtgggagcccacagcctctgggctggagtctgggtagggcttgggagtgcagggtagaccacagcccgccagggactaattagacttccaaatggctgctggcctcttgtctctaaatataaacccaagaagcttagactgagctctggggctcctaccagctgcttgggcacctcacagagggaagggctcaaactccctgcaaccagcgctgtaccctgttgtgtattccaactagccacacttacatagctcttggctgtacggtctccttgagcctcacccaaggacaagaaggaaaaagggcagttagcatggcagacagtgttgtatggtggtaagagctctggcctgagcaccttcagcacaggacccag

SEQ ID NO: 95 - DNA, 494 bp, Homo sapiens
  SITE (10): n equals a,t,g, or c
  SITE (494): n equals a,t,g, or c
aaggccaggngttcaagaccagcctgggcagcatagttgagacccccgtctgtactttttaaaaataaaaataataaaataaaaaatttttaaggaggtaataaacaacaaggtcaagcccattacagctgattaaaatctaataaatataaaaggaatgataacatcagaaaatcaccataactgtcatagcctacaattaattgaggcaagagtcatcaagggatgcccaaattttgggacaataataacctccttacttggaaaatgaaatggtaacttcacagtggagaaagcaaatggacactaagttacccaagtggtaaaagttaacaatcctaataataaaacaaaatgacataatcacttatgtagtattgatgccaaaaaatgtattacctgaatctagtcatgaaggaactccagatcagcccagattgaggaatgctgtacaaatcaagtggcctgtactcttttaaaatgctaataacatn

SEQ ID NO: 96 - DNA, 468 bp, Homo sapiens
  SITE (4): n equals a,t,g, or c
  SITE (31): n equals a,t,g, or c
  SITE (431): n equals a,t,g, or c
  SITE (456): n equals a,t,g, or c
tagnttttagaaacactttgcccagttaccnaaattgcaaaaaaagagatatgcattaagtatgagactagtaacacttgcaaataagtaagtaaataatttaattcactataaacttttaaaaagtgtatgggcctcatttttttaaaataaaacttccttaaaaaaccaaatacctcttctaatcattaaatgagtactaatagatttaacaacttaactaaagattacttttatatgtaacataatacacttgatgcattaaatatttgtattttcttcatatatttcaataataaaattactttaaccctttattaattttactccctagtcttctcctccatttacattcccacatttatttacacatctctacaagggaaatagcaggtagagactaaagatgttaggtccatcctacccctgtnaaagttggccattgtttttgctgtntaccaggtttct

SEQ ID NO: 97 - DNA, 669 bp, Homo sapiens
  SITE (2): n equals a,t,g, or c
  SITE (15): n equals a,t,g, or c
  SITE (546): n equals a,t,g, or c
  SITE (642): n equals a,t,g, or c
  SITE (657): n equals a,t,g, or c
cncggaccttatganactgctgtgtttaaaagttctcaactcccaaaatattaagtcacctctattaagtgctccaggatttcaaagtgtatctacttttgacagttacccactttccttttcttawagttaagrggraaagtctagttatttgaaaagccattggattttggtctgctttcataaagactttatccatccctatctatgagaaattaaactattgaccatagaatatttgtaaatacttcataaattccccattttgtcttacactttgcaacttcaacattcatattgatgactcaactgatactggactcaatggtagaaaacaagtttaactggggaatggaaagtaacccagctctccaccaacaaagccacagcctggaactgtgcttcaagatcttaacccggacattctccctttccagtatggcttcccccttccraaacccatgaaccttccaaattaactggaactgatcattgctgcagttctctaaattcatcattttcaaagtgtaatttgcagaaactagnccgtaagatggcccatgaaaataaggatcctgtgtttgtatatgatcttaaaatattcaatcccctcttggagattcatgagcatatgaaagactntgtaaaggtctgcantacaggacttaa

SEQ ID NO: 98 - DNA, 605 bp, Homo sapiens
  SITE (481): n equals a,t,g, or c
  SITE (485): n equals a,t,g, or c
  SITE (588): n equals a,t,g, or c
  SITE (597): n equals a,t,g, or c
gcggccaggttgttcctgcctctccgccacctccaccgcggcttrtcccctggctggcggcgttggcggggcgggggacagtagttgtagacgcccgcccctgcctcagagaagataccacattgaatgaacaaagactgaactttgtttacagataccttttataaaagatgtctgtggagtagtgttacagttcaaataacaaaggattttgcattatgagatgagtgagagtggagaattggacaaaaattgatttttgatctctgaattgtggtttttagctcaccagttattgtgtagtctcactatttgaaaattcatgctgaaaaactgagtgaatatgatcagatttctccaccaaattctcagcctgataaggaaaatcccgttttgtcaacctaatgaagcattcaaagaagacatatgactcttttcaagatgaacttgaagattatattaaagtacagaaagccagagnttangagccaaagacttgtttcagaaagatgaaaggggactatttggaaacctgtgggtacaaaggagaggttaattccagacccacgtatagaatgtttgaccccngactcccancctgaacc

SEQ ID NO: 99 - DNA, 538 bp, Homo sapiens
  SITE (47): n equals a,t,g, or c
  SITE (94): n equals a,t,g, or c
aaatgagttaagacaagtgcctgggacacagtagcctcttgtgtgtntttatcattatgtcctcagcaggtcgtagaagcagcttctcaggtgngaggctggcgcgattatctggagtgggttgggttttctaggatggaccccctgctgcattttcctcattcatccaccagggcttaatggggaatcaaggaatccatgtgtaactgtataataaactgtagccacactccaatgaccacctactagttgtccctggcactgcttatacatatgtccatcaaatcaatcctatgaagtagatactgtcttcattttatagatcagagacaattggggttcagagagctgatgtgattttcccagggtcacagagagtcccagattcaggcacaactcttgtattccaagacacaaccactacatgtccaaaggctgcccagagccaccgggcacggcaaattgtgacatatccctaaagaggctgagcacctggtcaggatctgatggctgacagtgtgtccagatgcagactgga

SEQ ID NO: 100 - DNA, 315 bp, Homo sapiens
ggcgggttaaagagcgcgttgctggctgggcacgcgtgcttgagaaggttcaatggcgtggcagggactagcggccgagttcctgcaggtgccggcggtgacgggkctkacaccgcagcctgtgtcctcaccaccgccgcggtgcagctggagctcctcagcccctttsaactctacttcaacccgcaccttgtgttccggaagttccaggtctggaggctcgtcaccaacttcctcttcttcgggcccctgggattcagcttcttcttcaacatgctcttcgtgttccgytactgccgcatgctggaagagggg

SEQ ID NO: 101 - DNA, 568 bp, Homo sapiens
  SITE (113): n equals a,t,g, or c
  SITE (339): n equals a,t,g, or c
  SITE (544): n equals a,t,g, or c
  SITE (549): n equals a,t,g, or c
gtataaggctcccagtaggatttagctaggctactagaagttagactgctttcgcattaaacagctaacttcatccacagcaaattgactcaatcaggaaccttcatttgaangtgtgttagaggatggggtaaatacccgatagctgtctttttggtgaaagaaaaggtgcatttcaagaacttggggggcaggaggaaagcacaatgtttcttagccaggaaagacaaataatccaacgctgctagtcttaaccccagaccagagagaactgcagatctgactgggcctaaattaagtagcttaatgaaaccatgtaattacttgttctcctttctnttgctatagaaaatctaccagtttaaatgagcttcaccttctgggtgaagtttctaaggtcaacatgaatcctcttacctctstcactgctcgtgttctgccttttcaaaaggaccactatgaacagatcagcgcattctctaggccaaaagggctagccaggtggcaagatcaatttagctactttgtattttcagagtcaaanttccngacggttttccaaaggtct

SEQ ID NO: 102 - DNA, 1005 bp, Homo sapiens
  SITE (960): n equals a,t,g, or c
  SITE (996): n equals a,t,g, or c
  SITE (1002): n equals a,t,g, or c
gggcccctcgmgggatcctctagagcggccgccctttttttttttttttttttgagatggagtctcattctgtcaccaggctagagtgcagtggcatgatctccgctcattgcaacctccgcctcctgggttcaagtgattctcctgcctcagcctcccaagtagctggggttacaggcgcccaccaccacacccggctaattttttgtatttttagtagagacggggtttcaccatgttggccaggctggtctcgaactcctgaccgcgtgattggcccaccctcagcctcccacagtgctgggattacaggcatgagccactgsgcctggccaacagattttttttctttgagacggagtttcgctttgtcrcccaggctggagtgcagtggcacgatctctgctcactgcaagctctacctcccgggttcatgccattctcctscctyagcctcccgagtagctgggactacaggcgcccaccaacacacccggctaattttttgtatttttagtagagatggggtttcaccgtgttagccaggatggtctcgatctcccgacgtcacgatcctyctgcctcggccttccaaagtgctgggattacaggcgtgagccaccacgcccagsctaawttttttgkatttttagtagagatggggtttcaccgtgttagccaggatggtctcgatctcctgacctcgtaatctgcccaccttggcctcccaaagtgctgggattacaggcgtgaggccgacagtatttttaaagggagtaacatgatgagatttgagttctgaaaagatcattctggctacaatatggagaatgacctggagagcagcggggggacaggcagaacaggcccacagggagctgttgccatcatctgctgagagatgacagtagcctggactgtggcagtagtgaaggagttggaaagacgtggacggattanagtggaaagtggttcttcactgggggggatttttgncctcanggg

SEQ ID NO: 103 - protein, 101 aa, Homo sapiens
  SITE (100): Xaa equals any of the naturally occurring L-amino acids
CYWAHLKLILAPLMLCSLQPDLYIPFWKKTKNVNLPSGMDLGMQTCWDLRVPGFPCSRCGEPRDVLFGIKHSKGQWAWAQLLSIGQGQPHPDCELFPTRXK

SEQ ID NO: 104 - protein, 37 aa, Homo sapiens
NSAEQFPPGWSFGLFQSLLLQIKLQQITPQIYMLLDL

SEQ ID NO: 105 - protein, 80 aa, Homo sapiens
TTVMKPSSLKSRSSAVNRIAKLGRWRQGQLFPSPRRQQLNFPLTLPRAARCRLRIRVLFLPWGCICSLFSLGLLVCCQWS

SEQ ID NO: 106 - protein, 52 aa, Homo sapiens
  SITE (15): Xaa equals any of the naturally occurring L-amino acids
LSFVAPMNLFLTILXISNNFGGNRMGIHSPLGASLVLFHEEAPHHLLRWPQG

SEQ ID NO: 107 - protein, 66 aa, Homo sapiens
IRQSWELFQVGSHDLLICAPHPIHTPLFFKALSFFLAPSHASGLFYIFPALAPGTTSSLVNLAFFY

SEQ ID NO: 108 - protein, 142 aa, Homo sapiens
GTAQGIPAAGFWPQHALRQPGERPCGLQVPVGKIMSSSRVGLRLAACLLNVSEAGRKYIVENIAKAALLDKNGKKHPQVSVLNIFSDQDYKRSVITIATSVDKLGLAEDLVLHVPGCSVFLFGELTCLRSAVLCREGSTGLV

SEQ ID NO: 109 - protein, 73 aa, Homo sapiens
  SITE (26): Xaa equals any of the naturally occurring L-amino acids
  SITE (49): Xaa equals any of the naturally occurring L-amino acids
  SITE (50): Xaa equals any of the naturally occurring L-amino acids
FCCNPYMPKIGGGLHRIYNIVGVWVXSLFLASTKYNGARFLSWHPEKKXXPAPKYCFLHQPSVHRSILLAQLQ

SEQ ID NO: 110 - protein, 76 aa, Homo sapiens
  SITE (17): Xaa equals any of the naturally occurring L-amino acids
  SITE (66): Xaa equals any of the naturally occurring L-amino acids
KLHLQGLLRAHSKQRRXPEARLCYSAALWGHKGFTWLLRADEASRKGPCVHGLTLKLPSLSSSQSXLSGPLGGYPH

SEQ ID NO: 111 - protein, 53 aa, Homo sapiens
  SITE (24): Xaa equals any of the naturally occurring L-amino acids
  SITE (33): Xaa equals any of the naturally occurring L-amino acids
  SITE (41): Xaa equals any of the naturally occurring L-amino acids
  SITE (42): Xaa equals any of the naturally occurring L-amino acids
  SITE (45): Xaa equals any of the naturally occurring L-amino acids
  SITE (46): Xaa equals any of the naturally occurring L-amino acids
QVQGSCKIPVAIKSSAVVGVWRTXSPSSNHLLXGSKMVTLXXQPXXLNFMELG

SEQ ID NO: 112 - protein, 49 aa, Homo sapiens
EKLTVRPPSRMKQLLPDGRWRAWLSLHWEGLNFSVPVSFFIKQRESVCL

SEQ ID NO: 113 - protein, 52 aa, Homo sapiens
SHVQQPAAVVAALSSHKPPVRGEPPAASPEASTCQSKCDDPEEELCHTRKLL

SEQ ID NO: 114 - protein, 51 aa, Homo sapiens
SLDNKKISRARHSGHTCNLSSHDHTNALQPVKQSETLSLQKNKKGKKEKKK

SEQ ID NO: 115 - protein, 146 aa, Homo sapiens
FGAVCRRLWQAVTGKLHCTLGLGNFSVNTSKGNTAKNGGLLLSTNMKWVQFSNLHVDVPKDLTKPVVTISDEPDILYKRLSVLVKGHDKAVLDSYEYFAVLAAKELGNSIKVHEPPRKIERFTLLQSVHIYKKHRVQYEMRTLYRC

SEQ ID NO: 116 - protein, 82 aa, Homo sapiens
  SITE (51): Xaa equals any of the naturally occurring L-amino acids
SRLPEPPGFLVKFAEEDLSVLTYMLHRTNESLRQSFFTQQRLIFFHPLLGXKHSCPACLHFKHDQNCASLQITTDQQWGPAS

SEQ ID NO: 117 - protein, 89 aa, Homo sapiens
KVIFSSKSTTLSFYIQFKFPLPPQQELKGVSFLCSFALWLAAASDFSRAGAKGSNVKKIEGSYLTVGAVVILLYVSMAAAQMMTCPLGP

SEQ ID NO: 118 - protein, 104 aa, Homo sapiens
LVWPLGLTLGPGERGGNKRCQESAIPETRSPRFCSMMGPSLQKVVGTGPASCASVPLGRAGGFQVGWLQLRDSPKRGAESRCKGPLRGLFWHSMGGEILLTLVV

SEQ ID NO: 119 - protein, 65 aa, Homo sapiens
ETSSTHILLMGVKSISSLESSLLIVMKITLIYTPFNMTFSFQQIFLYVRYDGFIILLLQHCNSKD

SEQ ID NO: 120 - protein, 48 aa, Homo sapiens
YISWYCGLIWGEVISDFYIGFISKVFVYIDSNRTQIQKQIVLYLFRRK

SEQ ID NO: 121 - protein, 75 aa, Homo sapiens
  SITE (15): Xaa equals any of the naturally occurring L-amino acids
  SITE (49): Xaa equals any of the naturally occurring L-amino acids
  SITE (53): Xaa equals any of the naturally occurring L-amino acids
  SITE (58): Xaa equals any of the naturally occurring L-amino acids
KVIKNVDQNVSTDSXGGSVSLEWVPLPGCLGHAQKACGRSLGCPFSLLXCVGXHRVTXFSLCSLCEHRVSASLWG

SEQ ID NO: 122 - protein, 97 aa, Homo sapiens
GQVIKALRGLHPSFYSLVLLPPASYSDSPPCKWEGWHEVSLPFVSEFCLLPSLPPDQVQWGSLQGCPSLLIFPPGSSPPWGSKGQSPSLQCPNGSGC

SEQ ID NO: 123 - protein, 100 aa, Homo sapiens
  SITE (21): Xaa equals any of the naturally occurring L-amino acids
  SITE (80): Xaa equals any of the naturally occurring L-amino acids
  SITE (83): Xaa equals any of the naturally occurring L-amino acids
  SITE (89): Xaa equals any of the naturally occurring L-amino acids
GRRVEHILKLWVIEAKDLPAXKKYLCELCLDDVLYARTTGKLKTDNVFWGEHFEFHNLPPLRTVTVHLYREDRQEEKKRXATXTWAWLXLPAASVGRAAI

SEQ ID NO: 124 - protein, 72 aa, Homo sapiens
  SITE (6): Xaa equals any of the naturally occurring L-amino acids
  SITE (30): Xaa equals any of the naturally occurring L-amino acids
  SITE (65): Xaa equals any of the naturally occurring L-amino acids
RWMPQXIQWFRFFSEVTLKDFSCKTVSCLXLSCDSSWVASFPLQELLLGSIFLSVIETSGTLLIXSLCIFMI

SEQ ID NO: 125 - protein, 110 aa, Homo sapiens
  SITE (100): Xaa equals any of the naturally occurring L-amino acids
ALVLDHCTNPGANPKLTSVSELGQQQGGEGKVGEEGAAHPEARVGGGKIPGAALDSPGSDPFPSPTSERQASRGWLRPVIPALWEAEASGSPEVQDSRPXLTNMVKPHLY

SEQ ID NO: 126 - protein, 41 aa, Homo sapiens
  SITE (4): Xaa equals any of the naturally occurring L-amino acids
  SITE (34): Xaa equals any of the naturally occurring L-amino acids
KKDXEGRQKVFWLFNLYVNFHVNLKKKKILLKIXLPPALAF

SEQ ID NO: 127 - protein, 144 aa, Homo sapiens
  SITE (25): Xaa equals any of the naturally occurring L-amino acids
TLGDTIEGTPAGTGPEFPGRPTRPXTVTPPGLAREDWKIIRALSEIAGMTLPYDTLDQVRNRLEEVSPNLVRYDDIEGANYFQQANELSKLVNQQLLADPLVPPQLTIKDFYMTDSISRASQTMAKCVKAVTEGAQAVEEPSIC

SEQ ID NO: 128 - protein, 55 aa, Homo sapiens
  SITE (10): Xaa equals any of the naturally occurring L-amino acids
LFSSISTATXLAISVLPFIVEFLKNFLYLLSAVLLLLSSLLQSNIPPIFHQNCPC

SEQ ID NO: 129 - protein, 70 aa, Homo sapiens
RGSGITIRTVWPGAVAYACNPSTLGGQGGWITRSRDRDYPGQHGETPSLLKIQKLVRCGGGHLYPSYWGS

SEQ ID NO: 130 - protein, 62 aa, Homo sapiens
  SITE (48): Xaa equals any of the naturally occurring L-amino acids
LNNCAYIYIYLHVVIKNCVTLLHANMKTVLQYINLKKKKKKKRAAALXDPSRGPSLRVHATS

SEQ ID NO: 131 - protein, 68 aa, Homo sapiens
GDLPTSASQNSGTAGMSHHAQPKEVFKKSFLIRKCGTLFWSFRCLEHSLPNHLDRKIINLYFNKHFSS

SEQ ID NO: 132 - protein, 85 aa, Homo sapiens
NKAILPFKIELLCSLMITIEQTNLYSNISQQKFFKRFKSLLPYIYFIAFLGLGSKAPEEACVNPCIIAGCKSLASQEVTNFKLSI

SEQ ID NO: 133 - protein, 56 aa, Homo sapiens
  SITE (52): Xaa equals any of the naturally occurring L-amino acids
WRAKYSKEFLILTTGADPPPTLHPSCHPCDSSSRFASAAQELTPSEVMAYIXFAFD

SEQ ID NO: 134 - protein, 65 aa, Homo sapiens
RLKTGLKMNNTNWVMTLEPNTLVLFREVVDIQITEPRSKAKYKGTLKNIYNEVNTLTEFKTGTKY

SEQ ID NO: 135 - protein, 89 aa, Homo sapiens
LKSREGQGSPRLLCGDSFTSLLCILRYCKRTREKWRMNPGENKVVRRFRHVASLRVSRVLINSRTGGGDILDAAVKATEPRKAETPPCL

SEQ ID NO: 136 - protein, 55 aa, Homo sapiens
CGVHFHLLLNQLKFLSESFPRVEKYLSSSTYYSLVLRDKNHVRVYNVMEHKTFKL

SEQ ID NO: 137 - protein, 55 aa, Homo sapiens
SFSQQLHSFQKLRYIPYEYQHCDICVANYFLWNHSFNFTSCCLGRLCREHIFNRL

SEQ ID NO: 138 - protein, 37 aa, Homo sapiens
  SITE (27): Xaa equals any of the naturally occurring L-amino acids
DLGDHLNQNPEWNSIQGRLWGQFPQMXHCFSSVGTHL

SEQ ID NO: 139 - protein, 224 aa, Homo sapiens
  SITE (134): Xaa equals any of the naturally occurring L-amino acids
  SITE (184): Xaa equals any of the naturally occurring L-amino acids
  SITE (185): Xaa equals any of the naturally occurring L-amino acids
  SITE (190): Xaa equals any of the naturally occurring L-amino acids
  SITE (195): Xaa equals any of the naturally occurring L-amino acids
  SITE (202): Xaa equals any of the naturally occurring L-amino acids
  SITE (217): Xaa equals any of the naturally occurring L-amino acids
SGETHPVDAQGDGGVHQALGEGVKALCPEAAVAAVREPPTVWHRFGEQSMHIAGHVRVMGPYLQQVKTELVLLIWEQLRKCCDSFNLLSFAESLQSWQDTLVETTDAACHEAMQWVTHLQAQGSTSILQALLKXFSFHDLEGLYLLTDGKPDTSCSLVLNEVQKLREKRDVKVHTISLNCSDRXXVEFLXKLASXTGGRYHXPVGEDTLSKIHSLLXKGFINEK

SEQ ID NO: 140 - protein, 54 aa, Homo sapiens
KFKRQSLQLSLISTEIKMIPPVTVLSDNSECKCAFWHKLSCPNSLDYNYKIMGF

SEQ ID NO: 141 - protein, 49 aa, Homo sapiens
SSNCTFAYTAKRTCSDPHKKTSIKVFIPLWFAVVSRQIGLTDICLFGSQ

SEQ ID NO: 142 - protein, 74 aa, Homo sapiens
  SITE (58): Xaa equals any of the naturally occurring L-amino acids
NTCVLENTVYMGFRLCCVVLIFLENLLFLNAATEKFPLFSVYTSVCLTSSSASFLDLXRCGCGLLAKKSRPFIF

SEQ ID NO: 143 - protein, 65 aa, Homo sapiens
STLTYSHLLGDFCRTLTIISIPDLNLMLKSMLGSSNFESYLLFWLVVTQISKNEHGFAPGGRGFK

SEQ ID NO: 144 - protein, 55 aa, Homo sapiens
LESHKIKSENSACISKNIILYACQCSYYILLWVGSIKDGKKDVCYEAFSPLFITP

SEQ ID NO: 145 - protein, 142 aa, Homo sapiens
  SITE (89): Xaa equals any of the naturally occurring L-amino acids
  SITE (97): Xaa equals any of the naturally occurring L-amino acids
  SITE (98): Xaa equals any of the naturally occurring L-amino acids
  SITE (105): Xaa equals any of the naturally occurring L-amino acids
  SITE (106): Xaa equals any of the naturally occurring L-amino acids
  SITE (141): Xaa equals any of the naturally occurring L-amino acids
ETVHYKRGVSQQFSLPSFKIDFSEWKDDELNFDLDRGVFPVVIQAVVDEGDVVEVTGHAHVLLAAFEKHMDGSFSVKPLKQKQIVDRVXYLLQEIYXXENKNNQXXKPFGRREQRQQQRVCGVPVRPAGHVDSCPAATCCXV

SEQ ID NO: 146 - protein, 68 aa, Homo sapiens
  SITE (10): Xaa equals any of the naturally occurring L-amino acids
  SITE (13): Xaa equals any of the naturally occurring L-amino acids
LTDSIIDHYXNCXRAKIRHEVCFVGSELSDIRSCKVDCMFWKAKSWLLRLKLSGHSGPCCCAQSEYLG

SEQ ID NO: 147 - protein, 52 aa, Homo sapiens
  SITE (30): Xaa equals any of the naturally occurring L-amino acids
GLRQICLILIGQITLKGRFTLHASYFPLKXLSEFSILFLENDVKSKFCLFYS

SEQ ID NO: 148 - protein, 41 aa, Homo sapiens
  SITE (28): Xaa equals any of the naturally occurring L-amino acids
FLKIHILMCLKNVTSSLLFFFSLVLMLXVSTSNKKFKNIVV

SEQ ID NO: 149 - protein, 79 aa, Homo sapiens
PKDSGCEACCKPMLNCLLESPNHLLCRHQKLKTKSQLSYRIYCGPCLKKLVHSVGILSQSILISFSKAPNPNTGVLVVY

SEQ ID NO: 150 - protein, 68 aa, Homo sapiens
ERIHFQIQNNIILLYYMHILNTITKVSRVLIKAPIIIYVKYCKTLKSQNKTYFFPIIFFEMITFLHTL

SEQ ID NO: 151 - protein, 87 aa, Homo sapiens
LNGSRALGLFLPCLFLKLRCLTSGLHQAKREIKDLRFFQKLCLPLGRKAVGLGPCGGQVGGVWQLPTEGRGSPVGRRHPRRGRRRII

SEQ ID NO: 152 - protein, 117 aa, Homo sapiens
KVSSGLNENLTVNGGGWNEKSVKLSSQISAGEEKWNSVSPASAGKRKTEPSAWSQDTGDANTNGKDWGRSWSDRSIFSGIGSTAEPVSQSTTSDYQWDVSRNQPYIDDEWSGLSMSF

SEQ ID NO: 153 - protein, 114 aa, Homo sapiens
  SITE (82): Xaa equals any of the naturally occurring L-amino acids
  SITE (88): Xaa equals any of the naturally occurring L-amino acids
  SITE (99): Xaa equals any of the naturally occurring L-amino acids
VIPSHRLLETASGVDAASTLPSQPRQNAEGACCTQLLLPGSASTDSFRIPRFMSSRPQLHMDHKQAVSWKNQAWESERPDSXSGWGYXPTIVSFGQLSXPSLKPQYLYQVKVGE

SEQ ID NO: 154 - protein, 64 aa, Homo sapiens
FSQDPIKSSHLRHLERELPSIGGKLLVPEYILPKTLLIGWPPSRAPLNTQLSEGTPFTSGKRAG

SEQ ID NO: 155 - protein, 53 aa, Homo sapiens
  SITE (6): Xaa equals any of the naturally occurring L-amino acids
  SITE (11): Xaa equals any of the naturally occurring L-amino acids
  SITE (21): Xaa equals any of the naturally occurring L-amino acids
  SITE (44): Xaa equals any of the naturally occurring L-amino acids
IYTSRXAGEPXAFPNQIVCHXKLFSALHDLLGNSLTRTVVSYKXQNEKTDTPK

SEQ ID NO: 156 - protein, 153 aa, Homo sapiens
  SITE (81): Xaa equals any of the naturally occurring L-amino acids
  SITE (126): Xaa equals any of the naturally occurring L-amino acids
  SITE (143): Xaa equals any of the naturally occurring L-amino acids
  SITE (152): Xaa equals any of the naturally occurring L-amino acids
RHQRNGDGKEDLNQKAWDIQMLFFSRDRQKYLNEPNYEALISIQIGIMEQTIAVLDKMHKKNVENCKKLLKKLGKFSNQKXIANYALSCNLREELVAVSERKDICNAMGSKLTCEKIVKERYENMXQQQKLTNVSEPQAEPGXNTTRPEVEXF

SEQ ID NO: 157 - protein, 46 aa, Homo sapiens
LWRLRQENLLNPGGRGCSEPRPLHSSLGNKSETPSQKNTKNHLGWW

SEQ ID NO: 158 - protein, 90 aa, Homo sapiens
ESQRSSEKVSVCRFVAVIFKIIDLHCRGIHVPPPARAGGLSVCLFVCLPTRPLDFLDPNGGVLHGLPEKLQSLLAFPERSTGILLGSLKA

SEQ ID NO: 159 - protein, 44 aa, Homo sapiens
SIILYALHTVFLGLAFFTSHGSLVVEFINTVVYSFLWLIQTSIL

SEQ ID NO: 160 - protein, 99 aa, Homo sapiens
NSGTVLVPLKKWFSNVISKSLEALISSPTQDLNSSEDIKSISFLTGYHYVSDTYPYFENKALKSQNLKVKNYLMQVSYTGLASLIQKFQIHNAPKSETF

SEQ ID NO: 161 - protein, 128 aa, Homo sapiens
  SITE (89): Xaa equals any of the naturally occurring L-amino acids
  SITE (109): Xaa equals any of the naturally occurring L-amino acids
  SITE (111): Xaa equals any of the naturally occurring L-amino acids
  SITE (113): Xaa equals any of the naturally occurring L-amino acids
  SITE (115): Xaa equals any of the naturally occurring L-amino acids
  SITE (117): Xaa equals any of the naturally occurring L-amino acids
LPPQYFSSETSGSCALNPEEVLEQPQPLSFGHLEGSRQGSQSVPAEQESFALHSSDFLPPIRGHLGSQPEQAQPPCYYGIGGLWRHRDXKPLNPPNKSFSTFRLLQGPXEXLXLXQXITIFLWPRQSC

SEQ ID NO: 162 - protein, 189 aa, Homo sapiens
  SITE (95): Xaa equals any of the naturally occurring L-amino acids
  SITE (188): Xaa equals any of the naturally occurring L-amino acids
DPPGPENLFVNYLSRIHREEDFQFILKGIARLLSNPLLQTYLPNSTKKIQFHQELLVLFWKLCDFNKKFLFFVLKSSDVLDILVPILFFLNDARXDQSRVGLMHIGVFILLLLSGERNFGVRLNKPYSIRVPMDIPVFTGTHADLLIVGVPQDHHQRAPAVCRPSFELPGSPFVGSTCSPLTSRRLFXG

SEQ ID NO: 163 - protein, 124 aa, Homo sapiens
ELQDTTGDIVEGKVNKGIYLKEEKGVTLLYYGRYNSSCISKPEQCGPEGVTFSFFWKTQGEQSRPIPSAYGGQVISNGFKVCSSGGRGSVELYTRDNSMTWEASFSPPGPYWTHVLFTWKSKEG

SEQ ID NO: 164 - protein, 110 aa, Homo sapiens
QYPLRPPAHPHRGSISRFFPSHSWLLPPQVPPPYGAELGHLTLQQAGACPEAGAAGGRVLRASSSCPRMPPWSSAVTGPLGLKNFPMARTCGSSEKVSTASSMAKSPRSK

SEQ ID NO: 165 - protein, 79 aa, Homo sapiens
CKKMKTGINVLCIEMFSFIIWCLYLRVYIISPPVSCCQKKNFEFRKRNWCKVRAGHGGLMPVIPALWGAQGGWITRSGV

SEQ ID NO: 166 - protein, 84 aa, Homo sapiens
YKTDSSKIIFGKYMHRETYPTRCHGLIIPQLYFWEPGTCQGCEIDLRLLRTFRNWLSHSRKIRNLRNILDYSLKGQRENQSNGF

SEQ ID NO: 167 - protein, 165 aa, Homo sapiens
  SITE (153): Xaa equals any of the naturally occurring L-amino acids
  SITE (155): Xaa equals any of the naturally occurring L-amino acids
VVFPHRWRITSKQKLTTWDKVLDEFEQNEDETVSSTLLDTKWNKILDPPSHRLSFNPTLASVNESAVSNESQPQLKVFSLAHSAPLTTEEEDHCANGQDCNLNPEIATMWIDENAVAEDQLIKRNYSWDDQCSAVEVGEKKCGTWLVCQMRRXSXCSRHAYCDKG

SEQ ID NO: 168 - protein, 68 aa, Homo sapiens
  SITE (8): Xaa equals any of the naturally occurring L-amino acids
  SITE (31): Xaa equals any of the naturally occurring L-amino acids
VILPLLFXFFYFLILYSNLLQRKSPLPSCLXLSLFKIKDDCENPKNFHFWEAATGQGTYLFGSLQFPL

SEQ ID NO: 169 - protein, 51 aa, Homo sapiens
AQELKSSLSNIVKPHRQKYNNNSLKILNRGGFIDKILAVWFSTILYWLKFV

SEQ ID NO: 170 - protein, 108 aa, Homo sapiens
VKMKMTRSKMPSLRTSPLSLTQKGKSLVRRVKAKKPRSLKNQEFGRSRDPSPDGRRSFVVRGDACNARLALPVGAGAPCMLFIAGRSFPPSTSVLTRAARPCTEALTA

SEQ ID NO: 171 - protein, 184 aa, Homo sapiens
  SITE (2): Xaa equals any of the naturally occurring L-amino acids
RXSERPVLLKARHHQIEIRKKSSQKYLFLLELQNIIIQDHDQGQEKENRKSDNEGRKHRSRSRSKEGRRHESKDKSSKKHKSEEHNDKEHSSDKGRERLNSSENGEDRHKRKERKSSRGRSHSRSRSRERRHRSRSRERKKSRSRSRERKKSRSRSREEEIEIQKQGKKTADQVSFPLKIKTQA

SEQ ID NO: 172 - protein, 43 aa, Homo sapiens
  SITE (34): Xaa equals any of the naturally occurring L-amino acids
  SITE (35): Xaa equals any of the naturally occurring L-amino acids
MLFLLLICGYHSVLKVLNKLLFSPLTLLGNVEMXXKAQGAVLI

SEQ ID NO: 173 - protein, 98 aa, Homo sapiens
ICWICTQVKVFPSHAASSCLVPCELGTVRDGRWQSFNSRRVQQPGCFLYCSTDVCSEDPNSFHCHSKENIMDNVNFILFLPCLKKLKKKPKKKKKVLQ

SEQ ID NO: 174 - protein, 73 aa, Homo sapiens
PESRLPGSCSLLLAAEFYSLFPTPGPSVVLYLNPLPGPHNPSTCLCELPPGPHLGPGSLLCSCCLKDWPLPHC

SEQ ID NO: 175 - protein, 125 aa, Homo sapiens
  SITE (45): Xaa equals any of the naturally occurring L-amino acids
KSRSLAVFLYGLCSYGLKVKDLLITSIPCFIAVHFITLYRCHICXYIESLWQPCIKQAYQCRFSTTICSLSVCVSCFGDSQNISDFFTIMYVIVCDVTVVLGLGFHKSHLCKTVNLINACVVTAP

SEQ ID NO: 176 - protein, 96 aa, Homo sapiens
  SITE (63): Xaa equals any of the naturally occurring L-amino acids
APRPGPHIPRPALTPAAPPPGFLSEVLVPAQDRGSALSCPPLSDQLRVPLLGPARPKRSPRKXARGPSKESEKPNGAKQVLETLLADATSSEMNCS

SEQ ID NO: 177 - protein, 90 aa, Homo sapiens
  SITE (80): Xaa equals any of the naturally occurring L-amino acids
WCSVLCLGCDSNPLICQQSPTLLEALAQTTCFSSRKVSQIVVLSREWRGSQVPMPRCSREGETGPRAAHQPDESPCASVXLSGNAADWAT

SEQ ID NO: 178 - protein, 84 aa, Homo sapiens
  SITE (1): Xaa equals any of the naturally occurring L-amino acids
  SITE (40): Xaa equals any of the naturally occurring L-amino acids
  SITE (78): Xaa equals any of the naturally occurring L-amino acids
XTRCLASSKEWSRKLGQAADFGHEGEDRGSWFLSDDWRLXLERLFPALQLKLGERLPAALGVRSPEGCASPVEWLASXPGLLST

SEQ ID NO: 179 - protein, 87 aa, Homo sapiens
  SITE (78): Xaa equals any of the naturally occurring L-amino acids
GCGFYSKWATPVRFPWEELASLPPSWVTHALGVGDPGGCLTGCLLLPCPPRWRPHRHGQWSPLHSLRPDQQQGLHQEXHPAPEPLQR

SEQ ID NO: 180 - protein, 82 aa, Homo sapiens
  SITE (53): Xaa equals any of the naturally occurring L-amino acids
LFLPYQPQVCNPFLPASLGLEQNFSFIFCYYNFCFYSLKLQRSFCLSPQFFLXSFSKYVSTCLLGLHVVGTKMSPLEILVPV

SEQ ID NO: 181 - protein, 81 aa, Homo sapiens
KAACRRADYMEGNWVNSEPLWPELKSSKGRSVSCLSPKESFDNLPCYYAYCTHFLFLSANLEYYTYIIDLSLSCSNERPGE

SEQ ID NO: 182 - protein, 64 aa, Homo sapiens
SLEPLEVEVAVSCDCATALQPGRQSETLSENKTKQKNSVRTSNRYIPVSITHHWTRHWVACKIQ

SEQ ID NO: 183 - protein, 162 aa, Homo sapiens
  SITE (11): Xaa equals any of the naturally occurring L-amino acids
  SITE (38): Xaa equals any of the naturally occurring L-amino acids
  SITE (66): Xaa equals any of the naturally occurring L-amino acids
  SITE (157): Xaa equals any of the naturally occurring L-amino acids
VLEMEKEADQXDPQLCNDLELCDEAMASWMRSSCVPSXSLSTTSPRLSIQRCLLSWIVTLSQLVQXCRGLARTGGHAPGLRPTLGVFQAALELTSQCELHPDLVSQTFGYLFFFSNASLLNSLMERGQGRPFYQWSRAVQIRTNLGPRLGLATGSWXGRHCH

SEQ ID NO: 184 - protein, 82 aa, Homo sapiens
  SITE (48): Xaa equals any of the naturally occurring L-amino acids
KKKKKERDNNETDWHMYALRNKSTAPIKILNTLDRFKSTIWYFLFFEXESHPVGQAGVQCTIWLTATSASPVQAIPPPQPPE

SEQ ID NO: 185 - protein, 72 aa, Homo sapiens
HKQVTILLFSSPVHHNEIQETSCQPPGKHPCLLSISFTNYLLTETAFQIGQSYLFCVVIAFSKSNYFQHIQF

SEQ ID NO: 186 - protein, 67 aa, Homo sapiens
TELWGSYQLLGHLTEGRAQTPCNQRCTLLCIPTSHTYIALGCTVSLSLTQGQEGKRAVSMADSVVWW

SEQ ID NO: 187 - protein, 50 aa, Homo sapiens
KLTILIIKQNDIITYVVLMPKNVLPESSHEGTPDQPRLRNAVQIKWPVLF

SEQ ID NO: 188 - protein, 34 aa, Homo sapiens
NYFNPLLILLPSLLLHLHSHIYLHISTREIAGRD

SEQ ID NO: 189 - protein, 84 aa, Homo sapiens
  SITE (14): Xaa equals any of the naturally occurring L-amino acids
  SITE (44): Xaa equals any of the naturally occurring L-amino acids
  SITE (76): Xaa equals any of the naturally occurring L-amino acids
  SITE (81): Xaa equals any of the naturally occurring L-amino acids
PGHSPFPVWLPPSXTHEPSKLTGTDHCCSSLNSSFSKCNLQKLXRKMAHENKDPVFVYDLKIFNPLLEIHEHMKDXVKVCXTGL

SEQ ID NO: 190 - protein, 73 aa, Homo sapiens
  SITE (34): Xaa equals any of the naturally occurring L-amino acids
  SITE (35): Xaa equals any of the naturally occurring L-amino acids
  SITE (70): Xaa equals any of the naturally occurring L-amino acids
  SITE (73): Xaa equals any of the naturally occurring L-amino acids
GKSRFVNLMKHSKKTYDSFQDELEDYIKVQKARXXEPKTCFRKMKGDYLETCGYKGEVNSRPTYRMFDPXLPX

SEQ ID NO: 191 - protein, 58 aa, Homo sapiens
ILSSFYRSETIGVQRADVIFPGSQRVPDSGTTLVFQDTTTTCPKAAQSHRARQIVTYP

SEQ ID NO: 192 - protein, 105 aa, Homo sapiens
  SITE (36): Xaa equals any of the naturally occurring L-amino acids
  SITE (37): Xaa equals any of the naturally occurring L-amino acids
  SITE (57): Xaa equals any of the naturally occurring L-amino acids
GGLKSALLAGHACLRRFNGVAGTSGRVPAGAGGDGXXTAACVLTTAAVQLELLSPFXLYFNPHLVFRKFQVWRLVTNFLFFGPLGFSFFFNMLFVFRYCRMLEEG

SEQ ID NO: 193 - protein, 86 aa, Homo sapiens
  SITE (10): Xaa equals any of the naturally occurring L-amino acids
  SITE (38): Xaa equals any of the naturally occurring L-amino acids
  SITE (78): Xaa equals any of the naturally occurring L-amino acids
  SITE (80): Xaa equals any of the naturally occurring L-amino acids
NHVITCSPFXCYRKSTSLNELHLLGEVSKVNMNPLTSXTARVLPFQKDHYEQISAFSRPKGLARWQDQFSYFVFSESXFXTVFQRS

SEQ ID NO: 194 - protein, 108 aa, Homo sapiens
  SITE (6): Xaa equals any of the naturally occurring L-amino acids
RTTFHXNPSTSFQLLHYCHSPGYCHLSADDGNSSLWACSACPPAALQVILHIVARMIFSELKSHHVTPFKNTVGLTPVIPALWEAKVGRLRGQEIETILANTVKPHLY

SEQ ID NO: 195 - DNA, 1051 bp, Homo sapiens
atagatgacataatccattcagcaaacacttattaagcatgtgtgtgtttgaggcacggtgacagcacagcaatgattaagctgcaatcctgactttctaaggagactgcaatgaatggttaagtaagaaatatgaaacaagtcaggcagtacagtgaacttcccagtgaataatataaacagttaagtggtgcttagaaaatagaggaatcactgtgagctaggatggcttgggaaggctttaaggaggtggtaagcttaagcaaaacccccaaatctcagctgcttcttacattcatagaattttccaggttctagaataaagcacaaaccatttcaaggaaatgtaaatttctcagttggagcaactctcgtgctctctcttcagtcagttgccgtggctgctgcttcatccagcccttctccctctcccactccgtgccattgcatcagtctgacatactccaagaacaaaaagtataaaaaatgactcagtaaaaacccccatcacttccttccttatctctgtctgactgttccttgccttctccctgcccagccagtttcttatgtgtcattccagagtttgtctacatacaagaaaacatgaatatagattcttgttttcctccatctttaagatagcatggtatactcacagtttggaatcttgcttttctccacttaacaatatatctggaaaatctttcctaataggacataaagcacattctcattctttttgatagctacatagtactacacggtgtggatgtagcataatttatttaaccagttccctcctgggtggtcatttgggttgtttcaatctttgctattacaaataaagcttcaacaaataactccacagatatatatgctccttgacttatgatggggttatgtctcaagaagcccatcataaataaaaaacatcccaagtctaatatgcatttaatacttcaataaactcattataaatttaaaaaattgtaagttgaaccatcatgagtcagggaccattactgtatatagtatttacacatgtgaa

SEQ ID NO: 196 - DNA, 594 bp, Homo sapiens
gtcaaatggcttatttctagtttcacgactaggagtgttctttggaaacccacatttgggtagtgaaaattgcactttctgggcaagactcctataaggctagaaatgacaatgcatcaaaagatgactttattatatttttatcagtggacaaacttcctaaaaaaattcacacactcatatctgcatataaaccaacatcataaaagtactaaaatgacactgttctgaatcatgcagtctttgcaaataacaagctggctgaaaaatatctaaatataattttaatttttgaactttttcttctaattggaaaattagctcatacctgtaatcccagcactttgggaggctgaggcaggcagattgcttgaggtcaggagttcgagaccagcctggccaacatggtgaaaccccatctctgctaaaaatacaaaaattagccggacgtggtggcgggcgcctgtaatcccagatactcaggaggctgaagaaggagaatctgttgagcctgggaggcagaggttgccatgagctgagatcacggcactgtactccagcctgggcgacaagagcaagaactctgtctcaaaa

SEQ ID NO: 197 - DNA, 2892 bp, Homo sapiens
gtgcttctggcccactgtgaaactctcaaatgctactgtggtcttgttttcatagacgggctcatcttcgcttgtgcctggagaagttgaaggggctggtgccacttggacccgaatcaagtcgacacactacgttgagtttattaacaaaagccaaattgcacataaaggtaagtgtattgttgggatgctgctttatctttacctgttcagtgagggtttgtctgttgttacatctccaggacagtcctctcccctgaactcctccagtctagctattggatgaatcacaggtacctcaaatgcaacatattcaaaacccaactgagtgtttctcactcccatgcaccagaggttaaatggtccatccaactctccatccagttgtacaagccagaaattcaggagtccgtgatagctcctgctccttaaccatatatctaggccatctccaaggcctaaatattttgcaaccggtctacttccatcttcatccccactgtctactgcaataaaatcctcagaggtctccctatatccctctgggtccctcccgtctgctttccatgcttcctgagaacagtccttccaaggtgcaaatcaacacgtgaccttgtttaaaattcttctgtggctcaggacaagctctgtcacctggtctgccccagattctgccttgcctggtcctcacttgcctctgcagcaccatcttgttccccaattcccctttctccagcccttcttccagtccctggcactgtcatattgtcttactttagggcctttgtcaatgctcttccctctgcttggtacactttcctctctcttcttcacctagaggacttctacttattcttcagatcacagtgcaagtctctctagctctgataatccttcgctgactttcccaactcagtgacctccttcctgtgacaggtggtcccatcactgggtatctcttagccctgtcataactgacatttgacagtggtttgtgtgaccattgtgttgtctcaatccttagactatacaccccacgagggaggggactgggtctttgtgctcacctcacagccccagcacctcctagggtatcgggcacagagttgacactctctttgctacctgaatagcaaagggtaaggggaattggattcaaagtcttgagagccacagccaaaatccctgtttagcatgtttgtataatcatattatagttggacaaatgttactttaattatggttagaagcctgcattcatgacaattctgggagaaaacctctatttaaagcaaaacagctacaattaaacaatcttcttaattatctgaagaatatgagaagctgggggcagatttataaaaatgagtattctatggaaatgtgttttctaaactcttctgttggacaaattagaatcaggacatcaaaagggactattatttcctgctaacaaacagaagttaattgagatttggcatgacacaaaaaagtgcttatgtaattgggacatgtacttgaataaacatagttttaaatggaagcgtgtttcttaagctcccatcaagtgcagttttctagtccggagatcaggtgttcaggggattgctgcaaacaagggagatcaggttggggactgctgcctgcagtctttctgatactaaaactgagggctaccagggtgccagtatgtgagagctcacccccagaatccctgtgacaggacaagtacccccagcactggcgatgctgaagagtcagacgaagccaggagtcactggccagtcgacttcctgtctcagggagaagcttgatgagtggcaccgaaaggcgtctgaggaagtgtggcgcattccactgctagaagggaagatgcgggggccattgcccatttagagatctccctgtggggcccaacaactacccctttgacttgcagaaacttgaagattgtgacagaaaagccgttcaccaaatcgaccagcttcagcgagagcagcgacacctgaagaggcagctggagaagctgggcattgagaggatccggatggacagcatcggctccaccgtctcctcggagcgctccgactccgacaggggtgagcctctctcactctcctccctgtctcccttgtgctccccaaccccagagcaggggttcagtactgcggacaggaggcagagtgtaagaagaactaagacactgggtatgatgtagagaagtcgaacagtgtgacctccagtgacaggttccttctccctgctaacacttaggtgacaaccccagaagagtttgattggtgtcagttttcagcctagtttgttttgttttgttttgagacggaatcttgctctgtcacccaggctggagtgcagtggtgtgatcttggctcactgcaacctccgcctcccgggttcaagcgattcccctgcctaagcctcccaagcagctgggattacaggcacacaccacaatgcctggcaaattttcctatttttgtagagatgaggtttcaccatattggccaggctggtctcgaactcctgacctcaagtaattcacccaccttggcctcccaaagtgctgggattacaggcgtgagccaccacacccagccaaatttttgtattagtagaaacagggtttcactgtgttggcccagctggtctcaaactcctaacctcaagtgatccacccgcctttgcctcccaaagtgctgggattacaagcatgagccaccacgcctgagctttctgcagagcgctttcatcaatgtccttctctcttgtcctccctgcagaagaaatcgacgttgacgtggagagcacggactatctcacaggtgatctggactggagcagcagcagtgtgagcgactctgacgagcgggg

SEQ ID NO: 198 - DNA, 1951 bp, Homo sapiens
acagtgggttggtgcttggggccaggagggaggtgggtggggaggcaggtgcagcagcaggcagggtaaaggtaaatgaaggctgagtgataggtggggtctcagtgacagagttcgaggcagcatctaagaaagaaagaaaggtgaagcagtcctggcttgtctgggacttctttccacatgcctgtcggagagcaggctctcagcacagctcatggaggaatgcctgccctaaattgcagtggtccctgctgtccagttcccgtgaagaccaacacggatatctcaggtgagaaagaccacaagaaaacatggaaccctacttgggattttcccagagaaacccattttttcaaacaccaaaataaaaccaaagaaaacagacacctgaaacctctccagtgtgcaacaatctgtgctccttaccgctcttgtcctccaaggcctggttgaaccactgtaatgaagccttcttctctaagtctaggtcctcggcagtgatcgaatagccaagctggggaggtggaggctaccaaagtgaaaaagaagaagtcaggccaatcagaaaaaacgggaaggctaggcatggtggctcacaccggtaatctcagcactttgggaggccaagccagctggatcacttgaggtcaggagtttgaggccggcctggccaacatggtgaaaccccatctctactaaaaacacaaaaaatcagccaggcgtggtagcaagcacctgtaatcccagctacttgggaggctgaggcaggagaattgcttgaactcaggaggcagaggttacggttagccaaaatcgagccactgcactccagcctgggtgacagagggatgttgtctcaaaaaacaaaaacaaaaataaattagaaaaaaaatcagaagaaacttgtccttagcgttcctaagacttaggagagctaagccggggagggcaggagtagatggacaagaccataccaaggtcagctgttcccctcgccgagaaggcagcagctgaactttccgcttacgctgcccagagctgccaggtgtagactgagaattcgagttttgtttcttccttggggttgtatctgcagctaaagaaagaaatcaagactcgtttgcttccttccctcttccagaaatggatggttgtgtctacccacttcgcatttcacactgagttttcaatgatggtatctctgaaaagattcaatcttctatggtttggttgcttggatggtgtttgtaagattaaggcgcgcacacaaaccgcttactgtgcagtaattactgggatcacccacaggtgactcaaactgagcttacctctatccaatcgttagcccccgtctgtagcctttctccctcatcagactataaacttctgaaggagaggaaatctctctctttgtatctaacatgccttagacatagcaatgctcaagaccttttttcaataggtattaatctctacatcctccacaaatacctccaccaccaacagcagcccctcctcctggctcagcaacctacccttttctccctgggactccttgtctgctgccaatggagttgaagaactggaatgatgacacatctcttcttctctgttgggaaaaaaggaacaatttagtctagaaagacttcttggctgaagtattaaataatttctcacaccctcctaactaccaagtggccaacatctaaaacaaccatcatttaagatctcagtatgccaggataaaaaaagtcaacaggaaattccaacagaatgaagggagactgttcacagaggccatgaagacagtttttgtcttaaaacaagcacaaaacaataatcttcaaaccttacttacaacctaccaagtccctgggagttctagacacagatgtgatcctgagggagtggcattccagccaactgcaagcacctaggggatcagctcgag

SEQ ID NO: 199 - DNA, 16472 bp, Homo sapiens
cagagccgtaaaggcgcgcgggaacatggggctgtacgctgcggtggcaggcgtgctggccggcgtggagagcgccagggctctatcaaggggctggtgtactccagcaacttccaggtagcgggcccgcgcgccacaagtaggggtggggggtgaggaacccggggtggggtgggacgggcccggatggggtcgggaggtggggcccggcgaggagggccgggggagcccccgacccagcttgtctccctcggccacacagaacgtgaagcagctgtacgcgctggtgtgcgaaacgcagcgctactccgccgtgctggatgccgtgatctccagcgccggcctcctcagtgcgaagaagctgcagccgcacctggccaagggtaggggcggggcggggaagtgaaccccgacggtcagcgctttgtcatctggtttcagccccgctgccgtgcacggcgggactggagcaagtcgctcacctgaaatgagtatgagcagaccttccctgggttacgaattgagatgggatgaaaatgctttaacttcgagtgttttgaaggattaaataaccgaagtacaaagtagtagtagcggagacagtaaggaagtcgggcgtggcggcgcgcacctgtggtcccagctactcggaaggctgaggggggaggatcacttgagcccaggagttcgaagctgcagtgagctgtgatgtggccactgcacttcagcctgggcgacagatctagaccccattctaaaaaaaaacaaaaaccccaaacccacacccacgaaagggtaatgttggcaagaagttgggtgcagaggtctactggtgaacatctgtggggaaagggtctaaggctgggaagcgagacgccaggttccgatcctgttgtgtagttaatttctggtgtggtcttgagtaaggtaccccacctttatctgtaaccatctagtcaggtgatctctttagccattccagtgcccgggctctattagagttagttctaaggcattcatacttcttgcttagggcgtttctgtctttgatccctcatccccaggtgctagtgtatgagttgttgggaaagggctttcgagggggtgggggccaatggaaggctctgttgggacggcaccaggcgaggtgttgagttggctcggctcaaggttcttcggggtgtgagctggcatgaggacctgttggaagtgggatccaggcctggtccaggtgagctggaaggagttgaggggcgggggaggtggggaactttgctcctgcctactcactgctcattgcgtcctacctagcctcccagctgcctcgatttgtgcgtgtgaacactctcaagacctgctccgtttatgtagttatttcaagagacaaggtttctcctatcagggtcgggcttccaggtgagagcttagagccctggctgtcctcatctagggaggtgtctggggtactgggaagagaagtggttggatagttgtgactttgctctctgggctttgttcctacctttccagcagtttctccatctccaaggtttgttttcctcgcatcccttaaacatcgaactcctaggagccccatcctacattcttccggagctctccgttttttctctaactttagctcctgcctcccacctggtgattctcaccgcccagtgtagacttcccttttgcattcttccctccttaggttcacatgaatgcaccacagatgccacagtcgctgcattcatctttcctctcagactttacacttagtacatccccagtttaatctaacagatgtcaccgttttccacccatttggtcaagccagaaaccgagtcatcctaggtgcttccttcccctccctccaatcatttactcctccaccttgagcatctttctcagctccactccttttttttttttttttttaggactgagtctcgctctgtcactctcaccgaggctggagtgcagtggcatgatcttggttcactacctccaaggttcatgcaatgctccttcctcagcctcctgcgtagctgggattagaggctcccaccaccatgtccagctaattattgtatttttagtagagatgaggtttcaccatgttgaccaggctggtctcaaactcctgacgtcaggtgatctgcccatcttggcctcccacagtgctgggattacaggcgtgagccacagtgcccggcctccactcctttctcttaattcccccggacactgcctaggttaagcactcatttcttattgggatgaccacaagaacttcccagactggtctctctgcttccagactgtctcactgcattttccttgaggttgactgtaggaagctctaaaggcagatctgatgcattactcctctgctaagcctttttttttttttttttttttttgagagagttttgctcttgtttcccaggctggatggagtgccctggcgcgatcttggctcaccgcaacctctgcctcctgggttcaagcgattctcctgcttcagccttctgagcagctgggattatgaaggggtggcctgcccctccacatctgtgggatatctcatcaggtgggacaagagactgagaaaagaaataagacacagagacaaagtatagagaaacaacagtgggcccaggagactggcacttagcataccaaggacctgcaccagcactggtctccgagttccctcagtttttattgattattattttcattatctcagcacaaggaatgcggtaggagagcagggtgataataaggagaaggtcagcaaaaaaacatgtgagcaaaggaatctgtgtcataattaagttcaaagggaggtactatgcctggatgtgcacgtaggccagatttatgtttccctccgcccaaacatctgtggagtaaagcataacaaggcagcattgctgccaacatgtctcgcctcccgccatagggtggtttttctcctatctcagaattgaacaaatgtacaatcgggttttataccgagacattcagttcccaggggcaggcaggagacagtgcccttcctctatctcaactgcaaggctttcctcttttactaatccacctcagcacagaccctttacgggtgtcgggctggggcacagcctctcatcccatgaggctatatttcagactatcacatggggagaaccttggacaatacctggctttccagggcagaggtccctgcagcttttcacagtacattgtgcctctggtttattgagactagagaacggcgaagacttttaccaagcatactgcttgtaaacgttttattaacaaggcatgtcctgcacagccctagatcctttaaaccttgattccatacaacacatgtttttgtgagctcaaatttggggcaaagtcacaaattaacagcatctcagccaaccaattgttcaaggtacaggtcaaaatggaatttcttatgtcttccctttctacacagacacagtaacagtctgatctctctttcttttccctacaggattgcaggcatgcagcaccatgcctggctaattttgtatttttagtagagacgggatttctccatgttggccaggctggtctcaaactcctgacctcaggtgatctgcccaccttggcctcccaaaatgctgggattacaggcatgaaccaccgcgcccggccatgctaagtcctttcttggctccattgtgctgtccctcctgcttcctctccaggtccatctgccacagtgctacgtgcaccagcgtgccagcaacagtggctggtctctgccccgtgcctcctccactgggctcacacctgtcttattttgtcctttggtggctctgagaagcagcctctgcccctctccctttcccttactctttgtaagatcctcttccttctgccctaccatgttgcttggacaccagggtggaatagcagagaacggctgcttgtgtttgaattccagctctgccacttcgatagatttctgaactgagacatgtgactccctaggcctatttctgcatgggtcggagagtgggcgggactgctttactgagttatagtgaatgtagttttaacctaagcgcctcacatgactaactcctcatccatcaagaatgagctcagctctcacttccccactcctcacccccctgtaaagtaacctttctccaaggttatgcttcaacaggaatagctaacatttattaaattgtggcacgtaagtatcttggatatattggctcattgaatcctcacacctactattttacagagatgccagtggggcttgagattgaatcacttgcccaggctcccactgctggtaaacagtagagggggctcctgacccataagtctggcttgacaacccattccctcaactgcggatcccggattcccttatcaccctgttgatttctccatagctgtggtaacatttgttgcatgaatggaccgttgaaatagggcctggcagggagaaattcaggaaatgatgaatgaatggttcttccctggcagcctcgatgacttacgagccctcaaggggaagcattttctcctggaccccttgatgccggagctgctggtgtttcccgcccagacagatctgcatgaacacccactgtaccgggccggacacctcattctgcaggacagggtaggcaagaggaatagaaaagggaagaatgtgtaggcacgggaagggcctagcctggggtctctgtttacccggcccctgtgttctgcctgccaggccagctgtctcccagccatgctgctggacccccgccaggctcccatgtcatggatgcctgtgccaccccaggcaataaagaccagtcacttggctgctcttctgaagaaccaagggtgagtgccacaggaggaggaggaggacatggggtttgattttgtgcctttcagtgggtaatgaaggctgaaaggatgactttcgcttaactctttcctgctgcaccaaagtagttcacggtatttgccccaagctaagctttccccactgcaggtgtgagatgtggatcccttagcccttggggcagagaccccaggccagttacctctgaccctgggccctttaaatataggctgtttcaatattgtgtgtcctggcttaacctgcatgttctggttgtctgtgtcagctgtgacaggcccttagctgctccatgcatgctcagctcacccctgctctgccctctgccctaggaagatctttgcctttgacctggatgccaggcggctggcatccatggccacgctgctggcctgggctggcgtctcctgctgtgagctggctgaggaggacttcctggcggtctcccccttagatccgcgctatcgtgaggtccactatgtcctgctggatccttcctgcagtggctcgggtgagatggtgagaaggcgtggctgagggactcagaggtccacagcagcttagacctggagtcatctgttttggtcttagttctgacactttaatgggcttgggaccctggagcaaaagttctcctctgtgaagcgaggatttcaggagcgaggatttcaggactgaggcagcctgtgaagctgtgtaaccgagacacgcttttccttaggtatgccgagcagacagctggaggagcccggggcagggacacctagcccggtgcgtctgcatgccctggcagggttccagcagcgagccctgtgccacgcgctcactttcccttccctgcagcggctcgtctactccatgtgctccctctgccaggaggagaatgaagacatggtacaagatgcgctgcagcagaacccgggcgccttcaggtacagggcgtgcgccagggtcgtggagggggggatggggtgaactgctctcttacccagcattggggctgtttctcttgcaggctagctcccgccctgcctgcccggccccaccgaggcctgagcacgttcccgggtgccgagcactgcctccgggcttcccccaagaccacgcttagcggtggcttcttcgttgctgtaattgaacgggtcgagatgccgacgtgagtgagtgggggcatgcttgggaggcgcaggatggtactggcacatctaacatctacatttctctagctcagcctcacaggccaaagcatcagcaccagaacgcacacccagcccagccccaaagagaaagaagagagcaaaaagctgcagccggtgcttgcacaccgccttgcacatagcagaggctccgggctcactccttcctggtgggaaaggaagatgcctgtcctctccgtggaagaccctgggccctcaccgcaggcagcagtttgcgttttgaaaggttattgggtcccttcctcgggctgtgttcttgctggtgagcaaaagtgttgcctgcagaaataaaatgcagaacgtactctacgatagatcacagttttttattcttaatgtcacaagcaggagaaaaatctcacattcatactaaaaattccaactagactcaacaggaatgaagtctctatttgtaatggaaagtcccagcctcccgctgccgtccagtgcgtgtactgtacacatccacactcattctcactcagggttcccggaccggctgtcctgcctgcggaactgaggtaaactagctcaggtactgacactaggagggtctaccttacataaggtacaggtagaagcttgattgctaggcccaggcccacccagaccctccaatcctaacaggtatttaggcttgaggttcactccctcctcagctgcacacgcagccaggtattaacgaggatcagagctgttctgaggggtgggaaggagcagccccgccaccactcactcaccctcagtcacatcggggagggggcaccagttacatttacatcacattatttataaaataagaattacatttcatataacatggccagaaggagctctagtcccccaggaaagctgccggggacagcatttgagcctcttctttgcacaggcataacttaactatacagctaattcctagttaatagcatttatacttaaccacctcaatgaaccaagcttgaaggaatttaaaaggcaatttagcttaaatacaaaaataaatttttgttaaaaaacgtttaaatatttttttcttttaatttagacacacgcattcatacttctcccaaagaggttgggcgtggcagcaaggcgcttgggctggggtatgtggtttcagaaggacggaaggaaaggatgggctgcagagggccctgtttgggaaaaataggattttaaaaatatggttcattaatttaggttttctaacatctactttgggtgatgtagcctccagtgaggtcagttaagtgggacagaaacggcagagggaagaggtctttgcttcccctgggcccattctccctggctgccagcccttgaagtcagaacaccatgggaaaattcaggagtcggcacttgtagccgtcaagtggtgctactttccacattcaattagcgaggccccagaaaacttgaaacaggaagtccggcactaccaacatgccgccactcatacaactcaactcttcctccaaactcgattcaaagagcaatacacagagcatcagacaaaggaacacaggacaaggcttgaaacatacaatcctggagaggcagacgagggcccaatggggccaaagggtagctgggcgaggaggcagctgaagcagcggtgggcatcctgcctgctccaagagcttctcccttcacccctggctctgccaggctaacagtcttgagccaccaagctctgaggggccaaactggcagagggttggagatgaaacattgattcaggcttggcaggaagaaaacggcaggagcagcacccactggggtctccaaggcaaagctagattcaagggcatttaaaaacgaaggaatcctgcaaggaactggtgagggacacagcagcaagaaatggggaaacagagtccccagaagggaccagaggaagagaaccacttctcacagctaagccaagcaagataaagctttacggatagcccatttcccaaatcccatcaggtgcacaccaccgatccaggcgggctggaccctgccccctccagcgacgacggtctcggggaaaggtggaaggggcgcctgcctaagggtgtgctaagcgggagtcagggcagcggacactatgtacaggtgtttccttagttctccagcctccccagtagaactgttcaagtagaggtcccgggctttggccctccgcatcctgcttccccttccctgaggcttgtgcttcctccagaagggaaagggccccagggctgccactgccccctggcggctgaagccagagatccggggtaggtttgctttacgcaactggaagggtccaaggctcttcctagcaggtgccaaggtccagatttagggaaggggtggggggaacagggacaggggacaaaggctactttttgcgggtgtgctgccttcgggcctgcagtcgctgtcgagcccctggggtcttggatcccgcaccaatggaaaatgaaagggccgccgatcctggaaagattcaacaagacctcatcagggcagctgctacctgagactctgactctgggtgcccaaatctctggaaggccaggccagtaataaaacacagggtgcctcaatagggctttccccgctgcatcagaaacactgtacgggagaagcctcctgaaatgcaaactcccagagagtctcagagcgaggcccaagaatccatttttacctggcttcccatgggaggcaaacttccaccccggacagctcctctctgatctctgccatccaactcccatccctgggttgtgctggactcctaacccgaaatgtctttcctgtgctgaacctgatcttcaccgggcctcagaggaccaggaacctgccaccccgcccaacccctcctcagacagatgagcagggccacagggtggcttgctgcttaccgaaaggtgcaacaccaacaaagccttgggcgggtgctgaggatgccccaaaggagaggctgctgcctgatgtgcccactccaggcgcaggggtgttcagaccaaaggtgggggtggcggtgcctggaatgaagagaacagagagctggccagtgagcagagggcagaggcaagcgaggagccgggcaggagcctgtgctccgcagggcacttcccacgggaccctcagccccacttctgcttctggggcactcctccatcagcagctgagccagacaaccgagtcttcatgcctggtgccccagctcagcctgcttctcccacccgctaatggccacgccagggcagagaaaaagcccccctgccccgcagccacctcgtgggcctcctgaccatcgctgcagaggggagtactctggggcccccgcctcctagcgtacctgggttggctacctcctctgttcaggccttttcccccagccaccgtcccctcccctctgaagcctggtttgtccgtcccgcgtcttttgtgatgccccgtggtcccctcccttccccggccttgccctgactggctctggctgcctgcccgaggccctctctggcagcccctctgcagggatggctgctctcagggcttggcctccggcccggacaagaggaagctccctgtgctcccacgctgcttccacactgtttctcttccttccctaaataccgtaactcaagttcagatcactttaatctgccatgtcctcatgtcacctgtcaactgccaggtcactccctgattcacagaggacccttggctcactggcttccttcccatcaccactcacggtgacttcgccctgtgaggctgactgatggtcctctcagcccctcaaccctgccacccccatgacctcctctccccgacccctgccaccactcctgcagccacactgtcaccacaactgctccggctcccgaatctcctgtaggcaccacccctcctgcagctgacttcacccgctctccactcctgcaccccctgagctgcatcggggcactgacccgctgcccctcctgctgtgcttgctggggtctccatggccgggtggcaccagctgtccgctgaccttaggtctacacccacagtgtcgctgggaaacacatgccatgctaactggcctcactttaacttcacaatcacaattttccagcccacaaactgcctggaaactgatcacactttttaatatgatgttcctttcccccactgtccaaaatgactatttcaaaagacccctttttttatacactttatcctgaccctctctctcccagattttctctacttcacgaagcaaacagaagccatgggatctacattcatcttccacatgggaggaaccatcactgcatccttctgcctgattctgcaatggttttcctgaacacttaagacccaaacacccaaccctggccacaaacaatccttgcctcttggcctccttccacaccactgctttagctcctgccctcctgccatgcttgtctttgttctgctcttcaacataccaaacatgtttctgcctctgggcctttgcatgcgccatcctgggcctgaaaggcatgtccacttgtgctgtgcccacccccatattcagcttacggtttgttttttgagacagagtcttgctctgtcacccaggccggagtacagtggcatgatcttggctcactgcaacctccaactcctgggttcaaaccattcttgtgcctcagcctcctgagtagctgggattacaggtgggtaccaccacgcccggctaattttttggtatttttagtagagacagggtttcgccaagttgtccaggctagtcttgaactcctggcctcaagtgatgcaccctccttggcctcccaaaatattgggattacaagcgtgagccactgcgcccaaccttcagcttacaattgttaactactcagaaggcctttgaccagttaaatccacaatggctcctccagtcattactacgttagcaaaacatgtatcgttccctggcatctcactgagttctatattcagtgcctgtctcttcactgccacagcataagctccccgagaccacaggcttcgcaggcacagcttttcagtgtccggcccggtagcccaagtccacgcccctccttacctccaaacacaggtttgctctcagttgtgctgctcacgttgaaggcaaacggtgtgctctggccggtggtgcccagggcgttctgacctaagccccctgcgaagggggtggaggtggctgtgctcccactctgtcctgctccaaagctgaaagctccggtggtggtgctggagcctggggtggccacattgatcccaaagctcccactgccagcgggggctgccgaacccccaaacgtgaagggtgatggtgttgtgctgccaaacaccgagctgctgctcccgctgctggcggtctgggtggtggctccaaagccggagctggtggctgcaccgaagaagacagcagtggagccgccaaaggcgggctgtgagctggcgggagcgccgaaggccgaagccgtggctttcaacccaaacgccgagtgcgtggcaccgccaaagataggatggatgggcgtaggcacgtacgcaggcacgaccttgatcatggacggaggtgcaggtgtgggtgcagcagccggggctgcagagtttccaaaagtgaaagagctgccaaagctgggggcaagggccggcttggcggcccccggtggctgcccctcagcggccccaaatgcgggctgggggttggctcccggatatgatgggagcggggacttggcgcttgagccaaagggaatgttgaacgtgggggtgctcgtgttactgaacgtcagagtgggctggctgctggtggccggggcggaggtggcgagggtgctgccaaaaccactaaagtcggcagcgctgctgctggtggccgttggcacggcagtgtgcagggactggctgaaggtggtgactgtggtggttgtgggcaaggcaggaggtttgccaaactggaatatggagcccatggccggggtgaagctggcagcagaggcctggggcgccccgaagaggaaaggctgtgaggcggcagtggcggtgctggtcgtggtactcacactgctgctgctcacactgtttatgccaaagccaaacgcaggcttcgaagcagagtctgtggatggactggcagaggtgatgggagccacagcagaggtggcgctggccaggccagtgaagagcggggcagttgtggtgggagcagtggcgggagtagttgtctgcttgaagaagggagcaggcaagggcacagatgcaggtggccccatgctgctaaagacaggctggaaggtcggggctgtggtgctggtggtcgtggggagggaggagctggagggcgctgtggctgagactgaagggccaggcggtgtggggccttccttctcactcttgggtggagccgtgaaaatgggcttgaacatgggaggtgctgaagatgcagcaggggcggcagggctggaaggtgaggtgttctgtgttccaaacaggaagctttgcttgggggcgggggacggggcagatgtggcttggggtttggtagccgtctctgcctgaagggttggaggtgccttggtgtcagtggctggtaccatggatggagcagggatcagccccagcaaagtggtcgggggtttggagtcaaaggaggggctggggagcagccctggcggccctgactgtgataaacccagcgggggtaggaggctgggtgtctttggaggtgagagggcctcagtggttgctgctccagcagattctggaagaagaatagaaaatgtgaaattggaataaacacttcaaagatgatggtattcagtatttcagtgtcctccccacgcctaccacagagcctgggatccaagagtcagtcaataaactcagctaagtctacactacaggcctgtacagtaaatcaaggaagtgttatttctacctcacagatcatcagacagaaggggataaaatggggcctaaatgggggcctaatgtgtagagactaagacagtccaattgtctgaactctgaagttcacgtatgaatctagatatactttatttgcctactaagctcacctgccaggcgctaagagcacacaactatgaatggggaagtctctgcccttgagcagggagggtgcgtacgaaccccaggttaccgtctgataaagaggtgtgcgcgcgcagtgccgtgaaggcctgggccgggaacaccagcagccctcgaagtgctggagggaaaggaagcagtgctgttctggaccagtggttctgacaggcaaggatatcctgaccacgccaccacattcacacttcagaggtgccgcacagggaagatcattctcatctgacagatgaggaaggcgaggctcagggcagctacgagccaggcttcagatcctgagcgtcgcagcaccccttctctaacacttcctgatgcgggctctggcgctgttaaacgtgggcccgctccggtgtgctgagccagggtgcgttcggcctgcagagcaatctccagcgactgacaggcacgacgcccttattccaactcaagccggggatgctgctcagaaggctggatccacggccccactccagctcacctgggcagggtggcaggctcgggggagtctgcatcttcttcaagctctctaacagtgggttggtgcttggggccaggagggaggtgggtggggaggcaggtgcagcagcaggcagggtaaaggtaaatgaaggctgagtgataggtggggtctcagtgacagagttcgaggcagcatctaagaaagaaagaaaggtgaagcagtcctggcttgtctgggacttctttccacatgcctgtcggagagcaggctctcagcacagctcatggaggaatgcctgccctcaattgcagtggtccctgctgtccagttcccgtgaagaccaacacggatatctcaggtgagaaagaccacaagaaaacatggaaccctacttgggattttcccagagaaacccattttttcaaacaccaaaataaaaccaaagaaaacagacacctgaaacctctccagtgtgcaacaatctgtgctccttaccgctcttgtcctccaaggcctggttgaaccactgtaatgaagccttcttctctaagtctaggtcctcggcagtgatcgaatagccaagctggggaggtggaggctaccaaagtgaaaaagaagaagtcaggccaatcagaaaaaacgggaaggctaggcatggtggctcacaccggtaatctcagcactttgggaggccaagccagctggatcacttgaggtcaggagtttgaggccggcctggccaacatggtgaaaccccatctctactaaaaacacaaaaaatcaaccaggcgtggtagcaagcacctgtaatcccagctacttgggaggctgaggcaggagaattgcttgaactcaggaggcagaggttacggttagccaaaatcgagccactgcactccagcctgggtgacagagggatgttgtctcaaaaaacaaaaacaaaaataaattagaaaaaaaatcagaagaaacttgtccttagcgttcctaatacttaggagagctaagccggggagggcaggagtagatggacaagaccataccaaggtcagctgttcccctcgccgagaaggcagcagctgaactttccgcttacgctgcccagagctgccaggtgtagactgagaattcgagttttgtttcttccttggggttgtatctgcagctaaagaaagaaatcaagactcgtttgcttccttccctcttccagaaatggatggttgtgtctacccacttcgcatttcacattgagttttcaatgggtatctctgaaaagattcaatcttctatggtttggttgcttggatggtgtttgcaagattaaggcgcgcacacaaaccgcttactgtgcagtaattactgggatcacccacaggtgactcaaactgagcttacctctatccaatcgttagtccctgtctgtagcctttctccctcatcagactataaacttctgaaggagaggaaatctctctctttgtatctaacatgccttagacatagcaatgctcaagaccttttttcaataggtattaatctctacatcctccacaaacacctccaccaccaacagcagcccctcctcctggctcagcaacctacccttttctccctgggactccctgtctgctgccaatggagttgaagaactggaatgatgacacagctcctcttctctgtcaggaaaaaaggaacaatttagtctagaaaggcttcttggctgaagtattaaataatttctcacaccctcctaactaccaagtggccaatgtctaaaacaaccatcatttaagatctcagtatgccaggataaaaaaagtcaacaggaaattccaacagaatgaagggaggctgttcacagaggccatgaagacagcttttgtcttaaaacaagcacaaaacaataatcttcaaaccttacttacaacctatcaagtccctgggagttctagacacagatgtgatccctgagggagtggcattccagccaactgcaagcacctagggggtcagctcgagtcaagaacctgaaggcgactgcccgctgacttgactctctctgctctccactctgcatggcctctgtgcttgcacccgatccctcatgctggagtgggaggcgacagccagaggccactggagtcagtatccaagactgtagggatgacagcacttcgggtgggtactgcattgtacctctcagggacttaagtttctttgattctccaagtcacagcagcacaaagcctaagagccaggttcgtttcccacctttcctcacccccgcctgtccacgcagcaaatgaaaactgcaggagaatgccaagtaccttattttctttgctggcctctccggtgtctgggagcgggaggaggctgggctagagaagggtgatgaactggggccatttctcttccagagctaaaaatcaagagggacatgactgagcctgctgataacttagcatctgaccctcaacacgacaaagtctcttttcaagtgactaaaaaaacattctttatggttaaatggttagtcatgcctgtaatcccagcatgctgggaggccaaggtgggaggatcgcttgagcccaggaatttgagcccagcctgggtaacatagcgagacccctgtctctacaaaaaaactgaaaaatcagttgggtgtggtggtttgcatctgtggtcccaactactcaggatgctgcagtgagctgagattgccccactgcactccagcctg

SEQ ID NO: 200 - DNA, 32193 bp, Homo sapiens
taatttttatttttattttgtagagatggggtttcactatgttgccccggctggtctaaaattcctggcctcaagcgatcctcctgcctccgccttccgaagtgctgggattataggcttgagtcaccaccgtgcccagcatacatctgctttctgaatatttgagaggcggaaggcacaaggcgtgacaattgatgggatttgggatgtaaagagcaagagaggactcaagcacagtcgcctcgaggtttctagccccggctgctgtcaccaaccactctcaggaaggtaggcagaaggttacgcaggagaaaccgtaggggtagttctgaggccctggaaggggtagttctgaggccccgggggtgcggagctgcaggtccagggaggagtggtgaggctggaggaaggtgaggctggaggaggaggttcaggaggctctgaggtaaagatggaggctggggccttgggagtcgaggagtttacccaagacgaagcatctgtgtggaagaaaagataaggctgggcgcagtggctcacgcctgtaaaccaagcgctttgggaggccgaggtgggcggatcatctgtggtcaggagttcgagaccagcctggtcaatatggtgaaaccccttctctactaaaaatacaaatattagccgggtacagtgcacctgtaatcccagctactcgggaggctgaggcacaaggatcacttgaacccgagaggcagaggttacagtgagccgagatcatgccactgcactccagcctgggtgacagagcaagactccatctccaaaagaaaaagaaactataaacatcattgaaagaaactaaagaagacctaaataaatggaaggaaatcatgttcatggattaaaagacttaatattattaaaatttcattacttcagaagtgatctacagattcaacacaatccctatcaaaatcccagctgtggctgggtgtggcggctcacttctgtaatcctggcacaaggtgggaggattgtttgagccgagaaatttgagaccagcctggcaacatgatctctacaaaaaatatagaaattagccaggcgttgtggtgccagcctgtagtcccagctacccaggaggctgaggaaggaggatcgcttgagtccaggagtttgaggctgcagtgggctatgatcacatcactgctctccggcctgggcaacagtgcaaggtcatgtctcaaaaaaaaaatcccagctggctttttttttttttttgagatggagtcttgctctgttgcccatgctggagtgcagtggcggacgatcagcctcagggcaggccatctagaagaattaccaaaaacaccaacccatttgtctctctataaagtgctgacatttgtgctctgcaacgtacagctgagagagcacaaaacttgtctgactcagcacagtctaggaagtcaagcagctcaatcttgaacaggacagtggtgtttggggggatcaagggaggggagcccagcgttccataggcgtagttcggtttgaacagaaacctggccagctctcctctctgcatgctcagaaggcccagctccatgccccacaatgtaatatctgtaagaagggacaaagaaggtgggtgaagcttgctcagtatcctgcttaatgctatcagtttcttccccctctaagtcagcagtactctggcctccatgtctccctcacacagttccctcttcctgcaatgtcttcctcctgagcctgtgcccagcttctagtgatagaaattttattcaaacttccgggctcagttcaaatgccccctcttccaggaagccttccctgaacttcccagctagaattaatcatgccttcattaagcacacccacaacactgctttcacctcccaggcactcatccgattctaccaagtgagctgagtgcaggtcagtctcctctactacattgtgaggtccttaagggtggagatgttctaatcttctgagtacaacctctcttttcaccatgtattgtgggaagtaagcattcgtcgatttttacttaataaatgaacaaagaaacattcccagtggtgagttaagtcagagtgcaaagattataccttgcccattaagccatctcccaaatgcctaggtctcaaggggagagaacatggctgttttaccaaaacccagcctcagcaaagtcaactcaaagaacctgcgctctgagcagtcttcccagcctgaggcatggtgcctcatctcgctcctaaacaatcccttcttctccagctcctactctgaatttaccctctccaagtttcattagccgaggagttttcctaaagtaattagaatcgaagggtctgtccaagtgttccaggtatccatagtatttcactagaatagaggaaagaatgtaaggaaaatggacccaaaacacccacgccaccataatatcgagtctctcatgatcacacagaaacaatgcgatcagatgagcttaagctgcccgacaccacgaggtacaggaataaatctctctgcattttaggagcctacccttcggctcagaggttcaagagcttcatggaagcatcacgcaaaggggacatagggttccttagctttcctcttaaaaaaactaattcatggcagaagcagcggctcacgcttgtaatcccagctactggggaggctgaggtgggaggatcacttgggaccaggagtctgagaccagcctgggcaacatagaaagtgccccatctctacaaaaatattaaaaattagccgggcatggtggattgcgcctgtaaatctcttatttgggaggctgaggctggagaatcacttgagcccaggaagcagaggctgcagtgagctatgttcgcaccactgcactccagcctggggaactgagcgagaccccgtttcaaaaacaaaaatccacttcaaacaaagcatttccaaccccattaaatgctttttgaaaatgaggcctctctcttcccaacagagtgcgatgacatggatcctgcggacaaaccgccccagggcgtacctagcaccgaagcatcaggcgccactaggtctccagctccttctcggatgacgtccttcagcacgccccggtcccccgagatgtccagcatcctctgacttaaccgctcgtacagggactgatggagaatgaaagccaggcctcagagccgcagacccacccggccacccctcagcgtctacgcccccgaaacgtctgggccctcacctggccgggggcgtcgtcccttccaggactccctggtttaacgcgcttccccccatgtcctagctgccctccctgtggcgtgacgtcggcctggtgcgccccgctgcccttcctggctgtgactctggtggggttccgaaggcccctttatgcccggcagacccctaccgacggcggcattacattctggggccacgaggaggcactcatcgtttcgttccaaccgccgccaacggccctggccctcgcgagctctggaactacagaggtcgcacggtgagttgccaggtgtggcccgtaatcggagcgcacaaaacatgatgggacacgtaacgggaccacacagggcacattgggcacttgcaggggcgcgaggtggcggcacgtaatgggagcgcgctgagcatgatggggcatgtgcgggagcgccaggcggggcatgtaaccagagcgtgcggggcatgatggggcacggacatggggggttaggtggggcacgtaattggagctcgcggggcaggatggggcatctaactggagcgacagagagcacgatggggcacttacaggggccggaggctgggtacgtaatgagagcgagcgggaaatgatggggcacctaacgagcacgcagagcatgatggggcacgggtgcgaggtggggcgcacagtgggagcgcgtggggcgtgatgggacacatggcgaggccgtcagggcacaggggaagcacttttggaacacgtgagtgacagggctgccgcccttgaaggagccctcggagtggctgcgtggtggggcacgtggggcaggttcaggaaaaaggatgcagcatgtgattgcagggcaacctggtgaggacacgagagccacctgccaccagcagggttcagggctcccagctgtgggttacttccaccttctttcactttccctcttccattgtattctagagaatttaggcccagacaagacactgattgattgattgattgattgattgacagaggctcgctctgagcccaggctggagttcagtgatggatctcagctcactgcagccgccacctcctgggctcaagagatcctcctgcctcggcctcccaagtagctgggattacagacgtgcaccaccaggcccagctaatttattttttagtttttaatttgctggtaagatggtttgtagctttgttgcctaggctggtcttgaactcctggcttcaagcgatcctccagtcttgacctcccaaagtgctgggattataggcgtaggctacagccaactttcaatactgccccattgggggttacgtttccaacacatgaaattaggaggatacattcaaaccacagcagtatattatgaccataatattcattaactgtgtaacaggctgggcgcggtggctcacacctgtaatcccagcactttgggagaccagagtgggtagatcactcgaggtcaggagtttgagaccagcctggcccacatgatgaaaccgcctctctactaaaaatacaaaaaattagccggtgtggtggcaggcgcctgtaacctcagctacttgggaggctgaggcaggagaatcacttgaatccgggaggtggaggtggcagtgagcctgattgcaccactgcactccagcctgggcaacaagagcaaaactctgtctcaataaacaaacaaacaaacaaaacctgtataacagagtgtcattgaatttctaaacgttgaaagacttcacattaaaaaaaaactcacaatttaatattattgagtgaaagaaaccagacacaaaagggtacattctatatgatgctgtttatgtgacattcaaaaacaggccacatgacaacatggtaataaggacagtggctgtccttgttaggagttatgactggaaggaggcaggagggagctttctggaaacactgtacatcttgctcttgagagtgcacgtatatacatcaagtgtttatcaagctgtgtggttaagatttgcacacttgtatatgttatacctcgatttaaaaaatctaaataagtaaataaagataccttcaaatcttttaaaaaaaaaaaaaaaagaggccaggttcggcggctcacacctgtaatcccagcactttgggaggctgaggtaggaggattgcttgaggccaggagttcaaaaccagcccaggcaacaaagtgagacccctgtctctactaaagtaaataaaacaataaaataaaaaaaaaaattcgagagatcgaaccatcatctgccagtttgtattagaaaaaaagagagagagaaggaagactgcgtgcaataaggctcatgcctgtaatcccagcactttgggaggccaaggtgggaggattgcttgagcccagaagttgaagaccagcctgggcaacaaagcaagacccggtatctacaaaaaaaattttaaaaattagcttggcatggtggcatgtgcctgtagtcccagctactcaggcagctaaggtaggaggatggcttgagcctaggagttggaggctgcagtgagctgtgaccacgccactgcactccagcctgggcaacagagcaagacactgtcttcccctgccccccagccccccacccccccaaaaaaaggatataagagcaagagattgagattcagaaagaactgtttcccagcacctgtctgctcctgtcggggtcgtgaggtgtggacagtgtgcctagtccctctgtttctgcccctcctccacagtggccaaggccagcacttgaatgttatcagagcaggcccaacaaaggctgcctccccagtcctgtgatgtaacccagtttccacctgattctggtgaccttggggacacaggggtgttgctggggaaggggaggagagaaggggcagagaccaggcagtggtgcaggcgtccagctgcacttcccacttctgactctgtgcctgctgttccctgctgggaagaagaaaagccagtgatgctggcttgaggccatagtgggaggcccagtggatcctgagaagctaggtattccaatgtcgggctctcgctgggggcttctggtgcttcttctgtctcactgacaagctttcataggggagcaggtgggagatcagggtagaggccttgtaggttccaggctctctagaattacctgggagtgtcacctataagtgtagagttctgggtctcactggagaccccctgaagcagatcctttgaaggtgggcctctagaatctctattacacctatgctttcaacagtttcctgaaagtttgggaactgatctagaaggtggggagcttgcctaggttttgctgttcagttctaggtccggatgcatgctggggctggaccttgcattattagtgtcactgcaaatgaccctgcagatggcccctttcatgcttgtctccaaatttgagtaaaaaatgtagacacacacacacacacacacacacacacacacacgtatcttcaagggaccagttttttcactgcagtcttttgttttacagctgtggaaactgaggcccaaggtcatgtgggttaggactgggatccaggactcaaagtgtttcttataaaattctggtgctccttagggttgagggtggtgggtgagtgctggacagggggaggggagtggacaggactgaggtcggatgcctgtgtttcagcccgggcagtgagtgtggatggcttggcaggtgagcctgctggagctggaggaccggcttcagtgtcccatcagcctggaggtcttcaaggagtccctaatgctacagtgcggccactcctactgcaagggctgcctggtttccctgtcctaccacctggacaccaaggtgcgctgccccatgtgctggcaggtggtggacggcagcagctccttgcccaacgtctccctggcctgggtgatcgaagccctgaggctccctggggacccggagcccaaggtctgcgtgcaccaccggaacccgctcagccttttctgcgagaaggaccaggagctcatctgtggcctctgcggtctgctgggctcccaccaacaccacccggtcacgcccgtctccaccgtctgcagccgcatgaaggtggggagtgagggtgcaggcggggcggcggggcccgcggggactggatcctgtgctctctggcgctatcaactggcaccaaaacggatccagctatcctcgatttccctgcagccctgccctggcgcattcattccttagtgtttgagcggcagctaaacccaggtgctggggattgaagctacacgcacaggatgggagctccctggtgtcacgtgctcaccccttcctgttttttgtttgcagttctggtttgtttctttttctttttttctttctctctctcccgcccccttcccttcctctctctctctctccccctccctcgcccgccccccctttctttttcttctttctttttggagacagcgtctcactctgttgcccaggctggagtgcagtggtgtgatcatggctcactgcagcctccaactcctaggctcaagcaatccacccacctcagcctcccgagcagctgggactacaggtgcacaccaccatgcccagctcattttttatattttgtagaaatggggtctggttatgttgcccaggctggtgttgaattccttggcctccaacgatcttcctgcctgggcctcccaaagtgctggaattataggcatgcaccactgccctacgccccttgtttgtgtctggacactcccctgtttgcactctctggtgcatgagagtggggacttcattttgtcccctggtgtatttcagtgcctggagccatgcctggcacattgtaaatgtccaaaatgctgaatcagtgaattcctgcctttataggccatcaccaaacctagcagatcattctttaagatgagtaataataatacctgactgggtgttatatatataaaacacctgttataaaacacgtgactgggtggcttatgcctataataacagcactttgggaggccgaggtgggtggatcacttgagtccaggagtttgagaccagcctgggcaacatagtgagaccctgcctctacaaaagtttcaaaattagcctggttggccaggcgcagtggccactcctgtaatcccagcataaagctggagggagcatgggtgggggcgagatagggccagcgaggtaagctgcggctggggcatggagaggccagtgtgacccgggaatggatttggagtttattcacaggatgagggagaaaggcgggggctggagtgttttaagccagtgatgacatgctcagatctctctggcagaggggagctttgagggtgaggcaaaaggacagtgagagatgaaggtgccaggacctaagttggtgggaactgggacaaaggcctggggcagaccaaagacaaatttcaaacagaaaaaaaccctgacaactgtgtgtggcaaggagggtgagggatggggaggttgactccagctctgtaattcccccttgcacagaggaagtgatcgcaggggaggatccggcgtgggcaggtggagcgggaggtgcctggggatgtgcagtcgggttgaggggtgtgcagaccaggacagcggtggggctcagggcaagaggtgtggagggtccttcctcttggtggtcactgaagtcccctttggtggagaagaccaacccaggagagtctacatagtgataagggaagacactgatgatgaccccaaggggtaccaggcttaaaatctggattgagagagagagagccctgaaaaaggaatagaaagaatcctcagagcaggaacaccggctgagtgtggcctcccggaaatcagagagacagactgaaggaggagatcacgtgtgtgaaatgtctctgaggactgaaaagtgttaaatgtagcagtaagaactgattatcttggcaagagcaggtttaggggagtatggaaggtggaagccaactgcaggtgaggaagccgagtttatgttttattagttgatgggaaggagggagggaacaggctgggagattgtctgtcctttgtagttacgatccagcagctcagcttgggtccctgttttagatttgggcttaatttttttttttttggtagagacagggtctcactattttgtccaggctggactcaaactcctggcctcaagtgatcctcccgtctcggcctcccaaagtgctgggattccaggcatgagccactgttcccggccagatttgggttttgatgatcctgaggctcttctctgttgcaacacagaatacaactaaattgcactcctttattgccctctttaaggtgttcccgttgcctcctgtttattgagatcttgagatgctcgattgatgggtgcattgatttgcataacttagttcttctcacggggaaggaatgagtcccgtctgtctgcctggggagggtgacattggaatgctgttcttaggcctctgtgagatgttctgatgcctcattctccagagcaaggactctgtccgtttatgccagcaagtgcttgattctttacccaactcccttcctgaaagccccttgcagctctctggtgcttgggcacgatccaagccaaaaattctgtacattgcatgggtataaaccgacgggggctctggtcaagtcatggagtagatggtggtccaggagtcctggttggcacccccaaggctaggtcagatttggggcccgggcagtccaggagaagtgcatttatgtcagcttggggaggtcgcaaatccgtgctgtgtccaagcccaccaggaatggattcaggtgtttataggtgtggggattcaccaggttaaacccaggcccgtgtgagcaccactggccctagaattagcctcacctggcgccggcctttttgtgatggctcctgattaaatacccactaattctggatctgctggtgaccacagagttcacctgatgggtcccctacaggcagcattcaatccaggaagtgccagcatcacatggtgacttctggtagctgtaacatttagtgactgtctccatgtcatgcacaggggtgacattgagaccctcttatgcctgggaagttcctgctgtcaatgcagaatattctctttttttttttttttttgagacggagtctcgctctgtcgcccaggctggagtgcagtgggcgatctcggctcactgcaagctccgcctcccaggttcacgccattctcctgcctcagcctcccgagtagctgggactacaggcgcccgctaccacgcccggctaattttttgtatttttagtagagacagggtttcactgtgttagccaggatggtttcgatctcctgacctcgtgatccgcccgcctcagcctcccagagtgttgggattacaggcgtgagccaccgcgcccggcccagaatattctttgaagaaaaaaaaaacattagagatgggatttcactgtgttgcccagtctggtctcaaattcctagcctcaagtgatcctcccatcttggcctcctaaagtgctgggattacaggcatgagccactgtgcccagcctagaatattcttttttttttttcttgagatggagtcttgctctgttgcccaggctggagtgctgtggcgcaatctcggctcactgcaacctcctcctcccaagttcatgccattctcctgactcagcctccggagtagctgggactacaggtgcccgccaccatgcccggctaattttttttgtatttttagtagagacagggtttcactgtgttagccaggatggtctcgatctcctgacctcgtgatcagccagcctcggcctcccaaagtgctgggattacaggcgtgagccaccgcgcccggcccttagaatattcttgaattatcttattttttatttttattttttgagacagagtctcactgtgacacccaggctggagtgcaatggcatgatctcagctcactgcaacatcaatctcccaggttcaagcgattctcgtgcctcagcctcccaagtagctgggactacaggtgtgtgccaccacacctggctaatttttgtattttcaatagaaatggggtttcaccatgttggccaggctagtctcaaactcctgacctcaagtgaagtcccacctcagtctcccaaagtgctggaattacaggcgtgagctactgcgcccagactattcttgaacaatttaacctgttttggactcaagggtacctgggtggctctggttcccgccctggtttccctgggagtgcttgtggccattgggatactcccaagaaggtgatccaaggagctgagaaggggagggatcagctgctcatggggccatggcctgttgcctccaggaggagctcgcagccctcttctctgagctgaagcaggagcagaagaaggtggatgagctcatcgccaaactggtgaaaaaccggacccgaatcgtcgtgagtgccccttccctctgcccctgcctgggaccggccaccttcactttcctgtagagctcagttctcattggtcctttacagaaaaccatgccttccatataaagccagaactcaaagcattccggggcggggtggggaaagcgcaaatcctctcaggggaattcaacccagttgtcgttaggactggctccaagttggcttttgccctctgtgtccttgagactgagataacccaggacttgagtctcgggggtaaacagctgaaagcatgggcgtgactcctccgcccctgtgccacctgtgtctgcttgaccttgccagcctgtcatggtgccctcccagtacctgggtgcgcaggcgtggagaggctggcagccctgggccctggctgatctcctgaactgagaggcacatggggctgggacgcatagtgccccggccctggaggtggctgtgaaacagaaacaggagccgagcaagatccagaagcacttggcctccctcatttaccctcctcacccttgcgcggcaggcggtatcagccctgcctggtggaggcggagctcagggttctgcagggagttctggctccctcacagcaaagcccgctcgcccagggccttcctgctttccttcagttgtggaactctgggatatgcacatttaatagctgaaataggcaaagtggggtgtggtggcgtgcatctgtaatcccagcaactcgggaggctgaggcgggaggattgcttgaggctgggaggtcaaggctacagtgagctatgatcgtgccactgcgctccagcctgggcaacagagtgagaccctgtctgttaaaaaaaaaattaaaaattaaaacaggccaaagcagagcctctccatttgaaatgggagctggggccaccctccccacggccaccgccagggctccccatgcatggggtgaactccctgcccggcgccaggccatgcagcctcccctgagactcaggtcccaggaccaacccggtcaggaaggccctggggacaccgaggccagccagacagagcctggcagctcggctgtgactctgcagtgagcagccctccctgtcccagaatgagtcggatgtcttcagctgggtgatccgccgcgagttccaggagctgcgccacccggtggacgaggagaaggcccgctgcctggaggggatagggggtcacacccgtggcctggtggcctccctggacatgcagctggagcaggcccagggaacccgggagcggctggcccaagccgagtgtgtgctggaacagttcggcaatgaggaccaccatgagttcatctgggtgagtggacagggaggcgtcccatccccatacccgccagggccttccccttcccaacagtgccctggcttcccaccttctagccttaacctccctctctcttgccttccagaagttccactccatggcctccaggtaataaccttggagagagctcagccagggtctggtggctgcgggcacgggcatctcagctccactggttcctccattcagcttaaccagcgcctcccaagcagctgcctatagctggctctataactgagcctggggaagatagaggaaagtcacgtccctgccttcaagggtctcgcagacaggtggggaggcagatggtgaactgtgggtacctagaacagcagaagttcactcaagctacagaaatactagaggagggtagctcatgcctgcaatcccagtactttgggaggccaaggcaggagtattgctggaggccgggagttcgagaccagcctggccaatgtagtaacacccccgtctctacaaaaaatacaaaaataaaaaaattagttgggcatggtggcatgcgcctatagtccctgctactcataaggctgaggtgggaggattgcttgagcccaaagtttgatgctgcagtgagtcatgatcatgctactgcatgatccagcctgggtgacagagcgagaccctgtctcagaaaacaaaacactagaggaggagcaggtgtctgggaggcctggcagaggggcacacgcctgatggctgagaagggcccaggacccgagtttgccaggcaagccgagggaacagtcctgtaaaagggggagtggcgtgcggactctggttatgagaagttcagggtggctggatgtaaggcaggatatcaggaggagtgggagctgggagaggtgggaaatggccagaagcaacatccaggagcaccaggcatcccttgcttaccgtcctcacccttgcgcagcaggcagtatcagccctgcctgaaacttgctctgcagattgtgggaagagagcggatccatgttctagacccaacaaacgaacacgtgcagttcccaagccttcctcactccctgtttatgggagactccttgtttctcacatttcttttagtcttagagacaatttggtcaggagacatgggtttaaatgaaggcacagagcctgggcacagcagcttacacctgtaatcccagcactttggaaggccaaggcagaaggatgacttgaggtcaggagatcaagaccagcctggccaacatggtgaaaccctgtctctatgaaaaatacaaaaattagctgggtgtggtggcacatacctgtaatcccagctactcgggaggctgaggcacgagaatctcttgaacctgggaggtggaggttgcagtgagctgagattgctccactgcactccagcctgggtgacagagcaagactccatctcaaaaaaaaaagaaaagaaaacaagaaaaaaaaaagtccgggcatggtggctcatgcctataatcccagcactttatgctcaagtctgctttttttttttttttttttgagatggagtctcgctctgtcacccaggctggagtgcagtggacgatctcagctcactgcaacctacacctctcaggttcaagtgatctcctgcctcagcctcccgagtagctgggattacaggtgtgcaccccatgctcagctaatttttttatttttaatatagatggggttttgccatgttgaccatgctggtctcgaactcctgacctcaaatgattcgcctgcctcggcctcccaaagtgctgggattacaggcgtgagccaccgtgcccagccttgagtctttatttttagagacaggatcttgctctgtcacccaggctggagcgcagtggtgcaactgtagctcactgcagccttgacctcccaggctcaagtgatcctcctgcctcagcctcctgagtagctgggacgacaagtgtctgctaccatacccagctaatatttaaatttttagtagagatgggatcttgctatgttacccaggctggtctgggcctcaagcaatcctcccaccttggcctcccaaagtgttgggattataggtgtgagccactgtgcttagcctcccataaccctttgattcacgatactcataggctaagtgggtcctggaagctccggggtagccttctaaccaagatgctggctctggccactggaagtcaaactgggtgcacagaccagtgagagggcatgagggagcctagcaggggtgaacagcaaccctcagcctccccacagccctgcctctcctcctgcctctcctcggtctcctttgaggattcagcctctcgtcctcaccacttatggtctgagggcctccaggctcctcttctggctgtctacccctccacacccatagctccagtcatcacttccacagggatgactcagaagttccctctccgggagacccgtcccttacaggccacatccagtagcgctccagccattcagcagctccgcctggacgtcaagggcatgtccaaaaccgcgctcatgatcttcctactcccccatccctgagatttatcctgtggctgtggtgtcctgtggctactgtaacaaatgaccacaaacttggtggcttcaaacaaatttaatctctcatggttctgaaggccagatgtccaagatcacgatgacggcaaggccgcgctccctctggagactgtcggggaaaacctgcccctttcctcttcagcttcaggtggtggctgccatgccctggtgtttcctggcctgtgaccgcatcattccaatctctgcctccatcttcacgtggccttttctgtatgtgccggtctaatcttcctctgcttctctcttattttttgttttttgagacagagtctcactctgttgcccaggctggagtgcagtggtgtgatctcggctcactgcaaccgccacttcccaggttcaagcaattcccttaacttagccccctgagtagctgggattacaggcgtgcactcagcaaatttttgtatttttagtagagacgtggtttcaccatgttggctaggctggttgtgaactcctgggctcaagggatccaccagcctcagtctcccaaagtgctgggattacaggtgtgacccactgcgcttctccctataagagaggccttcctctgcctctctcttatagggatacttgtgatgccatgcaggacctgcccagataatccaggataaccttctctccaaatccttcccctgatcactcctacagatctcttccatagaaggtgacatttccaggctctaggaattaggacctgctctctctgggtggccgttgttcactccaccaccccaggtttccccatcctaccaaaagacacagcagcattgtgtcaactgcccaaactgaaaacctatgagttattctcgacctgacctttttcctgagcaagttctgtggatttaacttagcggtcacactgccaacttcaaccgaactccactgccaccaactcagtccaggccaccagttcttgtttaggtgactgccatgacccccattggtctctccctgcctcaactctgtcccctccatcctatatccccacactgtaaccagactgattatttatttatttatttattttttggggaaagaagcttgctctatcccccaggctggagtgcggtggcacaatctcagcttactgcaacctccgcctcccaggttcaaacgattctgcctcagcctcccaagtagctgagattacaggtgtctgccacaatgcctggctaatctttgtatttttagtagagacgggttttgtcatgttggccaggctggtctcaaactcctgacctcaagtgatccacctgccttggcctcccaaagtgctaggattacaggtgtgagccaccgcacctggccagactgatctttaaagaagtatacatgaacacagcactccatgacttaaaacccttaagaggactaccatttatctcaagataaaagaacaaaatcctcgctgggcacagtggttcatgcctgtaatcactgctttgggaagccgaggtgggaagatcactttaggccaggagttcgagaccatccatgggcaacatggtgagaccgcatttctacaaaagataaaattagctgggtgtggtggtgcacgtctgtagtcccagctacttggagggtgaagtgggaggatcacttgagccctggagttcgaggctgcagtgagctatgacggtgccactgcactccagcctgggtgacggagtgggacctcatcaaaagcaaaaacaaaaccgttattgtggctttgaggcctggatcataactacatcatttaatttggccaaaccggcccatttcaggtacccaaataccccacgtgctttcttgcttggctctgggactaatgtggttactggtgcagggtgagtggcaggtatcatgaaccacattgtggacctggagttgctaggaccttttctgccattacacagaaaaatcctccctgagaacacagccattggaggacacatggcagaggaagataagacaataaacagagacacataattatggccagcgtgggggctcacgcctgtaatcccaaaactttgggaggccgaggtgggcagatcacctaaggtcaggagttcgaggccagcctggccaacatggtgaaaccccgtctctactaaaaatacaaaaattagccgggcgtggtggcacgggcctgtagtcctagctactccagagggtgaggcaggagaattgcttgaacctgggaggcggaggttgcagtgagccaagatcgcgacactgcgcgacagagtgagtctttttgtctgaaaaaaaaaatatatatatatatatatacacacacatacacacatatatatatacacacacatatatatatgaaatgaccaatacacatgtgaacatattcaacgcaataactgcggttaaacagcagtaaaatcccattatttatccatcagattgacaaagactgaagaactggagaagaagtggcgaaacgggctcgcagcgtcgcattccctaccccagcaggtgcgcccgcagcgtcgcactccctagcccggcaggtgcgcgatcacacacacaccctgcagggggacttcgaccggcacttccggtcccggaagggcatgcccttggaccccggaagtccgggcgggggcagagccgggtgcgctttgcgacagagccgtaaaggcgcgcgggaacatggggctgtacgctgcggtggcaggcgtgctggccggcgtggagagccgccagggctctatcaaggggctggtgtactccagcaacttccaggtagcgggcccgggcgccacaagtaggggtggggggtgaggaacccggggtggggtgggacgggcccggatggggtcgggaggtggggcccggcgaggagggccgggggagcccccgacccagcttgtctccctcggccacacagaacgtgaagcagctgtacgcgctggtgtgcgaaacgcagcgctactccgccgtgctggatgccgtgatctccagcgccggcctcctcagtgcgaagaagctgcagccgcacctggccaagggtaggggcggggcggggaagtgaaccccgacggtcagcgctttgtcatctggtttcagccccgctgccgtgcacggcgggactggagcaagtcgctcacctgaaatgagtatgagcagaccttccctgggttacgaattgagatgggatgaaaatgctttaacttcgagtgttttgaaggattaaataaccgaagtacaaagtagtagtagcggagacagtaaggaagtcgggcgtggcggcgcgcacctgtggtcccagctactcggaaggctgaggggggaggatcacttgagcccaggagttcgaagctgcagtgagctgtgatgtggccactgcacttcagcctgggcgacagatctagaccccattctaaaaaaaaacaaaaaccccaaacccacacccacgaaagggtaatgttggcaagaagttgggtgcagaggtctactggtgaacatctgtggggaaagggtctaaggctgggaagcgagacgccaggttccgatcctgttgtgtagttaatttctggtgtggtcttgagtaaggtaccccacctttatctgtaaccatctagtcaggtgatctctttagccattccagtgcccgggctctattagagttagttctaaggcattcatacttcttgcttagggcgtttctgtctttgatccctcatccccaggtgctagtgtatgagttgttgggaaagggctttcgagggggtgggggccaatggaaggctctgttgggacggcaccaggcgaggtgttgagttggctcggctcaaggttcttcggggtgtgagctggcatgaggacctgttggaagtgggatccaggcctggtccaggtgagctggaaggagttgaggggcgggggaggtggggaactttgctcctgcctactcactgctcattgcgtcctacctagcctcccagctgcctcgatttgtgcgtgtgaacactctcaagacctgctccgtttatgtagttatttcaagagacaaggtttctcctatcagggtcgggcttccaggtgagagcttagagccctggctgtcctcatctagggaggtgtctggggtactgggaagagaagtggttggatagttgtgactttgctctctgggctttgttcctacctttccagcagtttctccatctccaaggtttgttttcctcgcatcccttaaacatcgaactcctaggagccccatcctacattcttccggagctctccgttttttctctaactttagctcctgcctcccacctggtgattctcaccgcccagtgtagacttcccttttgcattcttccctccttaggttcacatgaatgcaccacagatgccacagtcgctgcattcatctttcctctcagactttacacttagtacatccccagtttaatctaacagatgtcaccgttttccacccatttggtcaagccagaaaccgagtcatcctaggtgcttccttcccctccctccaatcatttactcctccaccttgagcatctttctcagctccactcctttttttttttttttttttaggactgagtcttgctctgtcactctcaccgaggctggagtgcagtggcatgatcttggttcactacctccaaggttcatgcaatgctccttcctcagcctcctgcgtagctgggattagaggctcccaccaccatgtccagctaattattgtatttttagtagagatgaggtttcaccatgttgaccaggctggtctcaaactcctgacgtcaggtgatctgcccatcttggcctcccacagtgctgggattacaggcgtgagccacagtgcccggcctccactcctttctcttaattcccccggacactgcctaggttaagcactcatttcttattgggatgaccacaagaacttcccagactggtctctctgcttccagactgtctcactgcattttccttgaggttgactgtaggaagctctaaaggcagatctgatgcattactcctctgctaagcctttttttttttttttttttttgagagagttttgctcttgtttcccaggctggatggagtgccctggcgcgatctcggctcaccgcaacctctgcctcctgggttcaagcgattctcctgcttcagccttctgagtagctgggattatgaaggggtggcctgcccctccacatctgtgggatatctcatcaggtgggacaagagactgagaaaagaaataagacacagagacaaagtatagagaaacaacagtgggcccaggagactggcacttagcataccaaggacctgcaccagcactggtctccgagttccctcagtttttattgattattattttcattatctcagcacaaggaatgcggtaggagagcagggtgataataaggagaaggtcagcaaaaaaacatgtgagcaaaggaatctatgtcataattaagttcaaagggaggtactatgcctggatgtgcacgtaggccagatttatgtttccctccgcccaaacatctgtggagtaaagcataacaaggcagcattgctgccaacatgtctcgcctcccgccatagggtggtttttctcctatctcagaattgaacaaatgtacaatcgggttttataccgagacattcagttcccaggggcaggcaggagacagtgcccttcctctatctcaactgcaaggctttcctcttttactaatccacctcagcacagaccctttacgggtgtcgggctggggcacagcctctcatcccatgaggctatatttcagactatcacatggggagaaccttggacaatacctggctttccagggcagaggtccctgcagcttttcacagtacattgtgcctctggtttattgagactagagaatggcgaagacttttaccaagcatactgcttgtaaacgttttattaacaaggcatgtcctgcacagccctagatcctttaaaccttgattccatacaacacatgtttttgtgagctcaaatttggggcaaagtcacaaattaacagcatctcagccaaccaattgttcaaggtacaggtcaaaatggaatttcttatgtcttccctttctacacagacacagtaacagtctgatctctctttcttttccctacaggattgcaggcatgcagcaccatgcctggctaattttgtatttttagtagagacgggatttctccatgttggccaggctggtctcaaactcctgacctcaggtgatctgcccaccttggcctcccaaaatgctgggattacaggcatgaaccaccgcgcccggccatgctaagtcctttcttggctccattgtgctgtccctcctgcttcctctccaggtccatctgccacagtgctacgtgcaccagcgtgccagcaacagtggctggtctctgccccgtgcctcctccactgggctcacacctgtcttattttgtcctttggtggctctgagaagcagcctctgcccctctccctttcccttactctttgtaagatcctcttccttctgccctaccatgttgcttggacaccagggtggaatagcagagaacggctgcttgtgtttgaattccagctctgccacttcgatagatttctgaactgagacatgtgactctctaggcctatttctgcatgggtcggagagtgggcgggactgctttactgagttatagtgaatgtagttttaacctaagcgcctcacatgactaactcctcatccatcaagaatgagctcagctctcacttccccactcctcacccccctgtaaagtaacctttctccaaggttatgcttcaacaggaatagctaacatttattaaattgtggcacgtaagtatcttggatatattggctcattgaatcctcacacctactattttacagagatgccagtggggcttgagattgaatcacttgcccaggctcccactgctggtaaacagtagagggggctcctgacccatcagtctggcttgacaacccattccctcaactgcggatcccggattcccttatcaccctgttgatttctccatagctgtggtaacatttgttgcatgaatggaccgttgaaatagggcctggcagggagaaattcaggaaatgaatgaatggttcttccctggcagccttgatgacttacaagccctcaaggggaagcattttctcctggactccttgatgccggagctgctggtgtttcccgcccagacagatctgcatgaacacccactgtaccgggccggacacctcattctgcaggacagggtaggcaagaggaatagaaaagggaagaatgtgtaggcacgggaagggcctagcctggggtctctgtttacccggcccctgtgttctgcctgccaggccagctgtctcccagccatgctgctggacccctgccaggctcccatgtcatcgatgcctgtgccgccccaggcaataagaccagtcacttggctgctcttctgaagaaccaagggtgagtgccacaggaggaggaggaggaggacatggggtttgattttgtgcctttcagtgggtaataaaggctgaaaggatgactttcgcttaactctttcctgctgtaccaaagtagttcacggtatttgccccaagctaagctttccccactgcaggtgtgagatgtggatcccttagcccttggggcagagaccccaggccagttacctctgaccctgggccctttaaatataggccgtttcaatattgtgtgtcctggcttaacctgcatgttctggttgtctgtgtcagctgtgacaggcccttagctgctccatgcatgctcagctcacccctgctctgccctctgccctaggaagatctttgcctttgacctggatgccaagcggctggcatccatggccacgctgctggcctgggttggcgtctcctgctgtgagctggctgaggaggacttcctggcggtctcccccttagatccgcgctatcgtgaggtccactatgtcctgctggatccttcctgcagtggctcgggtgagatggtgagaaggcgtggctgagggactcggaggtccacagcagcttagacctggagtcatctgttttggtcttagttctgacactttaatgggcttgggaccctggagcaaaagttctcctctgtgaggcaaggatttcaggagcgaggatttcaggactgaggcagcctgtgaagctgtgtaaccgagacacgcttttccttaggtatgccgagcagacagctggaggatcccggggcagggacacctagcccggtgcgtctgcatgccctggcagggttccagcagcgagccctgtgccacgcgctctctttcccttccctgcagcggctcgtctactccatgtgctccctctgccaggaggagaatgaagacatggtaccagatgcgctgcagcagaacccgggcgccttcaggtacagggcgggcgccagggtcgtggaggggggggatggggtgaactgctctcttacccagcattggggctgtttctcttgcaggctagctcccgccctgcctgcccggccccaccgaggcctgagcacgttcccgggtgccgagcactgcctccgggcttcccccaagaccacgcttagcggtggcttcttcgttgctgtaattgaacgggtcgagatgccgacgtgagtgagtgggggcatgcttgggaggcgcaggatggtactggcacatctaacatctacacttctctagctcagcctcacaggccaaagcatcagcaccagaacgcacacccagcccagccccaaagagaaagaagagacagcaaagagccgcagccggtgcttgcacaccgccttgcacatagcagaggctccaggctgactccttcctggtgggaaaggaagatgcctgtcctctccgtggaggaccctgggccctcaccgcaggcagcagtttgcattttgaaaggttattgggtcccttcctcgggctgtgttcttgctggtgagcaaaagtgttgcctgcagaaataaaatgcagaacgtactctacgatagatcacagttttttattcttaatgtcacaagcaggagaaaaatctcacattcatactaaaaattccaactagactcaacaggaatgaagtctctatttgtaatggaaagtcccagcctcccgctgccgtccagtgtgtgtactgtacacatccacactcactctcactcagggttcccggaccggctgtcctgcctgcggaactgaggtaaacaagctcaggtactgacactaggagggtctaccttacataaggtacaggtagaagcttgattgctaggcccaggcccacccagaccctccaatcctaacaggtatttaggcttgaggttcactccctcctcagctgcacacgcagccaggtataacactcgccctcagtcacaacggggagggggcaccggttacatctacatcacattatttataaaataagaattacatttcatataacatggccagaaggagctctagtcccccaggaaagctgccggggacagcatttgagcctcttctttgcacaggcataacttaactatacagctaattcctagttaatagcatttatacttaaccacctcaatgaaccaagcttgaaggaatttaaaaggcaatttagcttaaatacaaaaataaatttttgttaaaaaacgtttaaatatttttttcttttaatttagacacacgcattcatacttctcccaaagaggttgggcgtgacagcaaggcgcttgggcctggggtatgtggtttcagaaggacggaaggaaaggatgggctgcagagggccctgtttgggaaaaataggattttaaaaatatggttcattaatttaggttttctaacatctactttgggtgacgtagcctccagtgaggtcagttaagtgggacagaaaccgcagagggaagaggtctttgcttcccctgggcccattctccctggctgccagcccttgaagtcagaacaccatgggaaaattcaggagtcggcacttgtagccgtcaagtggtgctactttccacattcaattagcgaggccccagaaaacttgaaacaggaagtccggcactaccaacatgccgccactcatacaactcaactcttcctccaaactcgattcaaagagcaatacacagagcgtcagacaaaggaacacaggacaaggcttgaaacatacaatcctggagaggcagacgagggcccaatggggccaaagggtagctgggcgaggaggcagctgaagcagcggtgggcatcctgcctgctccaagagcttctcccttcatccctggctctgccaggctaacagtcttgagccaccaagctctgaggggccaaactggcagagggttggagatgaaacattgattcaggcttggcaggaagaaaacggcaggagcagcacccactggggtctccaaggcaaagctagattcaagggcatttaaaaaggagggaatcctgcaaggaaccggtgagggacacagcagcaagaaatggggaaacagagtccccagaagggaccagaggaagagaaccacttctcacagctaagccaagcaagataaagctttacggatagcccatttcccaaatcccatcaggtgcacaccaccgatccaggcgggctggaccctgccccctccagcgacgacggctctcggggaaaggtggaaggggcgcctgcctaagggtgcgctaagcgggagtcagggcagcggacactatgtacaggtgtttccttagttctccagcctccccagtggaactgttcaagtagaggtcccgggctttggcctccgcatcctgcttccccttccctgaggcttgtgcttcctccagaagggaaagggccccagggctgccactgccccctggcggctgaagccagagatccggggtaggtttgctttacgcagctggaagggtccaaggctctttctagcacgtgccaaggtccagatttagggaaggggtggggggaacagggacaggggacaaaggctactttttgcgggtgtgctgccttcgggcctgcagtcgctgtcgagcccctggggtcttggatcccgcaccaatggaaaatgaaggggccgctgatcctggaaagattcaacaagacctcatcagggcagctgctacctgagactctggctctgggtgcccaaatctctggaaggccaggccagtaataaaacacagggtgcctcaatagggctttccccgctgcgtcagaaacactggacgggaggagcctcctgaaatgcaaactcccagagtctcagagcgaggcccacgaatccatttttacctggcttcccatgggaggcaaacttccaccccggacagctcctctctgatctctgccatccaactcccatccctgggctgtgctgtactcctaacccgaaatgtctttcctgtgctgaacctgatcttcacggggcctcagagggccaggagcctgccaccccacccaacctctcctcagacagacgagcagggccacagggtggcttgctgcttaccgaacggtccaacaccaacaaagccttgggcgggtgctgaagatgccccaaaggagaggctgctgcccgatgtgcccactccaggcgcaggggtgttctgaccaaaggtgggggtggcggtgcctggaatgaagagaacagagagctggccagtgagcagagggcggaggcaggcgaggagccgggcaggagcctgtgctctgcagggcacttcccacgggaccctcagccccagttctgcttctggggcactcctccatcagcagctgagccagacaaccgagtcttcatgcctggtgccccagctcagcctgcttctcccacccgctaatggccacgccagggcagagaaaaagcccccctgccccgcagccacctcgtgggcctcctgaccatcgctgcagaggggagtactctggggcccccgcctcctagcgtacctgggttggctacctcctctgttcaggccttttccccctagccaccgtcccctcccctctgaagcctggtttgtccgtcctgtgtcttttgtgatgccccgtggtcccctcccttccccggccttgccctgactggctctggctgcctgcccgatgccctctctggcagcccctctgcagggatggctgctctcagggcttggcctccggcccggacaaggggaagctccctgtgctcccacgctgcttccacacagtttctcttccttccctaaataccgtaactcaggttcaaatcactttaatctgccatgtcctcatgtcacctgtcaactgccaggtcactccctgattcacagaggacccttggctcactggcttcctccccatcaccactcacggtgacttcgccctgtggggctgactgatggtcctctcagcccctcggccctgccacccccatgacctcctctccccgacccctgccaccactcctgcagccacactgtcaccacaactgctccggctcccgaatctcctgcaggcaccacccctcctgcagctgacttcacccgctctccactcctgcaccccctgagctgcatcggggcactgacccgctgcccctcctgctgtgcttgctggggtctccacagccgggtggcaccagctgtccgctgaccttagatctatacccagtgtcgctgggaaacacacgccatgctaactggcctcactttaacttcacaatcacagttttccagcccacaaactgcctggaaactgatcacactttttaatatgatgttcctttcccccactgtccaaaatgactatttcaaaagaccccttttttatacactttatcccgaccttccctctcccagattttctctcctacttcacgaagcaaacagaagccatgggatctacattcatcttccacacgggaggaaccatcactgcatccttctgcctgattctgcaatggttttcctgaacacttaagacccaaacacccaaccctggccacaaacaatcctcgcctcttggcctccttccacaccactgctttagctcctgccctcctgccatgcttgtctttgttctgctcttcaacataccaaacatgtttctgcctctgggcctttgcatgcgccatcctgggcctgaaaggcatgtccacttgtgctgtgcccacccccaccccacccccatattcagcttacgcttgagacagtcttgctctgtcacctaggccagagtacagtgtggcatgatcttcgctcactgccacctccacctcctgggttgaaacattcttctgcctcagcctcccgagcagctgggattacaggtgggtaccaccatgcccggctaattttttggtatttttagtagagacagggtttcgccaagttgcccaggctggtcttgaactcctgtcctcaagtgatccaccctccttggcctcccaaaatattgggattacaagcatgagccactgcgcccaaccttcagcttacaattgttaagtactcagaaggcctttgaccagttaaatccacaatggctcctccagtcattactacgttagcaaaacatgtatcatgccctggcatctcactgagttctatattcagtgcctgtctcttcactgccacagcataagctccccgagaccacaggcttcacaggcacagcttttcagtgtccggcccggtagcccaagtccacgcccctccttacctccaaacacaggtttgctctcagttgtgctgcccacgttgaaggcaaacggtgtgctctggccggtggtgcccagggcgttctgacctaagccccctgcgaagggggtggaggtggctgtgctcccactctgtcctgctccaaagctgaaagctccggtggtggcgctggagcctggggtggccacgttgatcccaaagctcccactgccagcgggggctgccgaacccccaaacgtgaagggtgatggtgttgtgctgccaaacaccgagctgctgctcccgctgctggcggtctgggtggtggctccaaagccggagctggtggctgcaccgaaggagaagacagcagtggagccgccaaaggcgggctgtgagctggcgggagcgccgaaggccgaagccgtggctttcaacccaaacgccgagtgcgtggcaccgccaaaggtaggctggatgggcgtaggcacgtgcgcaggcacgatcttgatcgtggacgcaggtgcaggtgtgggtgcagtagccggggccggggctgcagagtttccaaaagtgaaagagctgccaaagctgggggtaagggctggcttggcggcccccggtggctgcccctcagcggccccaaatgcgggctgggggttggctcccggatatgatgggagcggggacttggcgcttgagcaaagggaatgttgaacgtgggggtgctcgtgttactgaacgtcagagtgggctggctgctggtggccggggcggaggtggcgagggtgctgccaaaaccactaaagtcggcagcgctgctgctggtggccgttggcacggcagtgggcagggactggctgaaggtggtgactgtggtggttgtgggcaaggcaggaggtttgccaaactggaatatggagcccatggccggggtgaagctggcagcagaggcctggggcgccccgaagaggaaaggctgtgaggcggcagtggcggtgctggtcgtggtactcacactgctgctgctcacactgtttatgccaaagccaaacgcaggcttcgaagcagagtctgtggatggactggcagaggtgatgggagccacagcagaggtggcgctggccaggccagtgaagagcggggcagttgtggtgggagcagtggcgggagtagttgtctgcttgaagaagggagcaggcaagggcacagatgcaggtggccccatgctgctaaagacaggctggaaggtcggggctgtggtgctggtggtcgtggggagggaggagctggagggtgctgtggctgagactgaagggccaggcggtgtgaggccttccttctcactcttgggtggagccgtgaaaatgggcttgaacatgggagatgctgaagatgcagcaggggcggcagggctggaaggtgaggtgttctgtgttccaaacaggaagctttgcttgggggcgggggacggggcagatgtggcttggggtttggtagccgtctctgcttgaagggttggaggtgccttggtgtcagtggctggtaccatggatggagcagggatcagccccagcaaagtggtcgggggtttggagtcaaaggaggggctggggagcagccctggcggccctgactgtgataaacccagcgggggtaggaggctgggtgtctttggaggtgagagggcctcagtggttgctgctccagcagattctggaagaagaatagaaaatgtgaaattggaataaacacttcaaagatgatggtattcagtatttcagcgtcctccccatgcctaccacagagcctgggatccaagagtcagtcaataaactcagctaagtctacactacaggcctgtacagtaaatcaaggaagtgttcattatttccacctcacagatcatcagacagaaggggataaaatggggcctaaatgggggcctaatgtgtagagactaagacagtccaattgtctgaactctgaagttcacgtatgaatctagatatactttatttgcctactaagctcacctgccaggcgctaagagcacacaactatgaatggggaagtctctgcccttgagcagggagggtgcgtacgaaccccaggttaccgtctgataaagaggtgtgcgcgcgcagtgccgtgaaggcctgggccgggaacaccagcagccctcaaagtgctggagggaaaggaagcagtgttgttctggaccagtagttctgacaggcaaggatatcctgaccacgccaccacattcacacttcagaggtgctgcaccgggaagatcattctcatctgacagatgaggaaggcgaggctcagggcagctaagccaggcttcagatcctgagcgtcgcagcaccccttctctaacacttcctgatgtgggctccggcgctgttaaacgtaggcccgctccggtgtgctgagccagggtgcgttcggcctgcagagcaatctccagcgactgacaggcacgacgcccttattccaacccaagccggggatgctgctcagaaggctggatccacggccccactccagctcacctgggcagggtggcaggctcgggggagtctgcatcttcttcaagctctctaacagtgggttggtgcttggggccaggagggaggtgggtggggaggcagttgcagcagc

SEQ ID NO: 201 - DNA, 32190 bp, Homo sapiens
taaacaggatcttgctctgttgcccagactggagtgaagtggcacgactatagcccactgcagccttgaactccgggctcaagtgatcctcccgcttcagcctctccagtagctgaaactacaggcacacgccaccacgcccagctaatttttatttttattttgtagagatggggtttcactatgttgccccggctggtctaaaattcctggcctcaagcgatcctcctgcctccgccttccgaagtgctgggattataggcttgagtcaccaccgtgcccagcatacatctgctttctgaatatttgagaggcggaaggcacaaggcgtgacaattgatgggatttgggatgtaaagagcaagagaggactcaagcacagtcgcctcgaggtttctagccccggctgctgtcaccaaccactctcaggaaggtaggcagaaggttacgcaggagaaactgtaggggtagttctgaggccctggaaggggtagttctgaggcccccgggggtgcggagctgcaggtccagggaggagtggtgaggctggaggaaggtgaggctggaggaggaggttcaggaggctctgaggtaaagatggaggctggggccttgggagtcgaggagtttacccaagacgaagcatctgtgtggaagaaaagataaggctgggcgcagtggctcacgcctgtaaaccaagcgctttgggaggccgaggtgggcggatcatctgtggtcaggagttcgagaccagcctggtcaatatggtgaaaccccttctctactaaaaatacaaatattagccgggtacagtgcacctgtaatcccagctactcgggaggctgaggcacaaggatcacttgaacccgagaggcagaggttacagtgagccgagatcatgccactgcactccagcctgggtgacagagcaagactccatctccaaaagaaaaagaaactataaacatcattgaaagaaactaaagaagacctaaataaatggaaggaaatcatgttcatggattaaaagacttaatattattaaaatttcattacttcagaagtgatctacagattcaacacaatccctatcaaaatcccagctgtggctgggtgtggcggctcacttctgtaatcctggcacttcaagagccaaggtgggaggattgtttgagccgagaaatttgagaccagcctggcaacatgatctctacaaaaaatatagaaattagccaggcgttgtggtgccagcctgtagtcccagctacccaggaggctgaggaaggaggatcgcttgagtccaggagtttgaggctgcagtgggctatgatcacatcactgctctccggcctgggcaacagtgcaaggtcatgtctcaaaaaaaaaatcccagctggctttttttttttttttgagatggagtcttgctctgttgcccaagctggagtgcagtggcggacgatcagcctcagggcaggccatctagaagaattaccaaaaacaccaacccatttgtctctctataaagtgctgacatttgtgctctgcaacgtacagctgagagagcacaaaacttgtctgactcagcacagtctaggaagtcaagcagctcaatcttgaacaggacagtggtgtttggggggatcaagggaggggagcccagcgttccataggcgtagttcggtttgaacagaaacctggccagctctcctctctgcatgctcagaaggcccagctccatgccccacaatgtaatatctgtaagaagggacaaagaaggtgggtgaagcttgctcagtatcctgcttaatgctatcagtttcttccccctctaagtcagcagtactctggcctccatgtctccctcacacagttccctcttcctgcaatgtcttcctcctgagcctgtgcccagcttctagtgatagaaattttattcaaacttccgggctcagttcaaatgccccctcttccaggaagccttccctgaacttcccagctagaattaatcatgccttcattaagcacacccacaacactgctttcacctcccaggcactcatccgattctaccaagtgagctgagtgcaggtcagtctcctctactacattgtgaggtccttaagggtggagatgttctaatcttctgagtacaacctctcttttcaccatgtattgtgggaagtaagcattcgtcgatttttacttaataaatgaacaaagaaacattcccagtggtgagttaagtcagagtgcaaagattataccttgcccattaagccatctcccaaatgcctaggtctcaaggggagagaacatggctgttttaccaaaacccagcctcagcaaagtcaattcaaagaacctgcgctctgagcagtcttcccagcctgaggcatggtgcctcatctcgctcctaaacaatcccttcttctccagctcctactctgaatttaccctctccaagtttcattagccgaggagttttcctaaagtaattagaatcgaagggtctgtccaagtgttccaggtatccatagtatttcactagaatagaggaaagaatgtaaggaaaatggacccaaaacacccacgccaccataatatcgagtctctcatgatcacacagaaacaatgcgatcagatgagcttaagctgcccgacaccacgaggtacaggaataaatctctctgcattttaggagcctacccttcggctcagaggttcaagagcttcatggaagcatcacgcaaaggggacataggggtccttagctttcctcttaaaaaaactaattcatggcagaagcagcggctcacgcttgtaatcccagctactggggaggctgaggtgggaggatcacttgggaccaggagtctgagaccagcctgggcaacatagaaagtgccccatctctacaaaaatattaaaaattagccgggcatggtggattgcgcctgtaaatctcttatttgggaggctgaggctggagaatcacttgagcccaggaagcagaggctgcagtgagctatgttcgcaccactgcactccagcctggggaactgagcgagaccccgtttcaaaaacaaaaatccacttcaaacaaagcatttccaaccccattaaatgctttttgaaaatgaggcctctctcttcccaacagagtgcgatgacatggatcctgcggacaaaccgccccagggcgtacctagcaccgaagcatcaggcgccactaggtctccagctccttctcggatgacgtccttcagcacgccccggtcccccgagatgtccagcatcctctgacttaaccgctcgtacagggactgatggagaatgaaagccaggcctcagagccgcagacccacccggccacccctcagcgtctacgcccccgaaacgtctgggccctcacctggccgggggcgtcgtccccttccaggactccctggtttaacgcgcttccccccatgtcctagctgccctccctgtggcgtgagccttcggcctggtgcgccccgctgcccttcctggctgtgactctggtggggttccgaaggcccctttatgcccggcagacccctaccgacggcggcattacattctggggccacgaggaggcactcatcgtttcgttccaaccgccgccaacggccctggccctcgcgagctctggaactacagaggtcgcacggtgagttgccaggtgtggcccgtaatcggagcgcacaaaacatgatgggacacgtaacgggaccacacagggcacattgggcacttgcaggggcgcgaggtggcggcacgtaatgggagcgcgctgagcatgatggggcatgtgcgggagcgccaggcggggcatgtaaccagagcgtgcggggcatgatggggcacggacatggggggttaggtggggcacgtaattggagctcgcggggcaggatggggcatctaactggagcgacagagagcacgatggggcacttacaggggccggaggctgggtacgtaatgagagcgagcgggaaatgatggggcacctaacgagcacgcagagcatgatggggcacgggtgcgaggtggggcgcacagtgggagcgcgtggggcatgatgggacacatggcgaggccgtcagggcacaggggaagcacttttggaacacgtgagtgacagggctgccgcccttgaaggagccctcggagtggctgcgtggtggggcacgtggggcaggttcaggaaaaaggatgcagcatgtgattgcagggcaacctggtgaggacacgagagccacctgccaccagcagggttcagggctcccagctgtgggttacttccaccttctttcactttccctcttccattgtattctagagaatttaggcccagacaagacactgattgattgattgattgattgattgacagaggctcgctctgagcccaggctggagttcagtgatggatctcagctcactgcagccgccacctcctgggctcaagagatcctcctgcctcggcctcccaagtagctgggattacagacgtgcaccaccaggcccagctaatttattttttagtttttaatttgctggtaagatggtttgtagctttgttgcctaggctggtcttgaactcctggcttcaagcgatcctccagtcttgacctcccaaagtgctgggattataggcgtaggctacagccaactttcaatactgccccattgggggttacgtttccaacacatgaaattaggaggatacattcaaaccacagcagtatattatgaccataatattcattaactgtgtaacaggctgggcgcggtggctcacacctgtaatcccagcactttgggagaccagagtgggtagatcactcgaggtcaggagtttgagaccagcctggcccacatgatgaaaccgcctctctactaaaaatacaaaaaattagccggtgtggtggcaggcgcctgtaacctcagctacttgggaggctgaggcaggagaatcacttgaatccgggaggtggaggtggcagtgagcctgattgcaccactgcactccagcctgggcaacaagagcaaaactctgtctcaataaacaaacaaacaaacaaaacctgtataacagagtgtcattgaatttctaaacgttgaaagacttcacattaaaaaaaaactcacaatttaatattattgagtgaaagaaaccagacacaaaagggtacattctatatgatgctgtttatgtgacattcaaaaacaggccacatgacaacatggtaataaggacagtggctgtccttgttaggagttatgactggaaggaggcaggagggagctttctggaaacactgtacatcttgctcttgagagtgcacgtatatacatcaagtgtttatcaagctgtgtggttaagatttgcacacttgtatatgttatacctcgatttaaaaaatctaaataagtaaataaagataccttcaaatcttttaaaaaaaaaaaaaaaaagaggccaggttcggcggctcacacctgtaatcccagcactttgggaggctgaggtaggaggattgcttgaggccaggagttcaaaaccagcccaggcaacaaagtgagacccctgtctctactaaagtaaataaaacaataaaataaaaaaaaaaattcgagagatcgaaccatcatctgccagtttgtattagaaaaaaagagagagagaaggaagactgcgtgcaataaggctcatgcctgtaatcccagcactttgggaggccaaggtgggaggattgcttgagcccagaagttgaagaccagcctgggcaacaaagcaagacccggtatctacaaaaaaaattttaaaaattagcttggcatggtggcacgtgcctgtagtcccagctactcaggcagctaaggtaggaggatggcttgagcctaggagttggaggctgcagtgagctgtgaccacgccactgcactccagcctgggcaacagagcaagacactgtcttcccctgccccccagccccccaccccccccccaaaaaggatataagagcaagagattgagattcagaaagaactgtttcccagcacctgtctgctcctgtcggggtcgtgaggtgtggacagtgtgcctagtccctctgtttctgcccctcctccacagtggccaaggccagcacttgaatgttatcagagcaggcccaacaaaggctgcctccccagtcctgtgatgtaacccagtttccacctgattctggtgaccttggggacacaggggtgttgctggggaaggggaggagagaaggggcagagaccaggcagtggtgcaggcgtccagctgcacttcccacttctgactctgtgcctgctgttccctgctgggaagaagaaaagccagtgatgctggcttgaggctgtagtgggaggcccagcggattgtgagaagccaggtattccaatgtcgggctctcgctgggggcttctggtgcttcttctgtctcactgacaagctttcataggggagcaggtgggagatcagggtagaggccttgtaggttccaggctctctagaattacctgggagtgtcacctataagtgtagagttctgggtctcactggagaccccctgaagcagatcctttgaaggtgggcctctagaatctctattacacctatgctttcaacagtttcctgaaagtttgggaactgatctagaaggtggggagcttgcctaggttttgctgttcagttctaggtccggatgcatgctggggctggaccttgcattattagtgtcactgcaaatgaccctgcagatggcccctttcatgcttgtctccaaatttgagtaaaaaatgtagacacacacacacacacacacacacacacacacacacacacgtatcttcaagggaccagttttttcactgcagtcttttgttttacagctgtggaaactgaggcccaaggtcatgtgggttaggactgggatccaggactcaaagtgtttcctctaaaattctggtgctccttagggttgagggtggtgggtgagtgctggacagggggaggggagtggacaggactgaggtcggatgcctgtgtttcagcccgggcagtgagtgtggatggcttggcaggtgagcctgctggagctggaggaccggcttcagtgtcccatctgcctggaggtcttcaaggagtccctaatgctacagtgcggccactcctactgcaagggctgcctggtttccctgtcctaccacctggacaccaaggtgcgctgccccatgtgctggcaggtggtggacggcagcagctccttgcccaacgtctccctggcctgggtgatcgaagccctgaggctccctggggacccagagcccaaggtctgcgtgcaccaccggaacccgctcagccttttctgcgagaaggaccaggagctcatctgtggcctctgcggtctgctgggctcccaccaacaccacccggtcacgcccgtctccaccgtctgcagccgcatgaaggtggggagtgagggtgcaggcggggcggcggggcccgcggggactggatcctgtgctctctggcgctatcaactggcaccaaaacggatccagctatcctcgatttccctgcagccctgccctggcgcattcattccttagtgtttgagcggcagctaaacccaggtgctggggattgaagctacacgcacaggatgggagctccctggtgtcacgtgctcaccccttcctgttttttgtttgcagttctggtttgtttctttttctttttttctttctctctctcccgcccccttcccttcctctctctctctctccccctccctcgcccgccccccctttctttttcttctttctttttggagacagcgtctcactctgttgcccaggctggagtgcagtggtgtgatcatggctcactgcagcctccaactcctaggctcaagcaatccacccacctcagcctcccgagcagctgggactacaggtgcacaccaccatgcccagctcattttttatattttgtagaaatggggtctggttatgttgcccaggctggtgttgaattccttggcctccaacgatcttcctgcctgggcctcccaaagtgctggaattataggcatgcaccactgccctacgccccttgtttgtgtctggacactcccctgtttgcactctctggtgcatgagagtggggacttcattttgtcccctggtgtatttcagtgcctggagccatgcctggcacattgtaaatgtccaaaatgctgaatcagtgaattcctgcctttataggccatcaccaaacctagcagatcattctttaagatgagtaataataatacctgactgggtgttatatatataaaacacctgttataaaacacgtgactgggtggcttatgcctataataacagcactttgggaggctgaggtgggtggatcacttgagtccaggagtttgagaccagcctgggcaacatagtgagaccctgcctctacaaaagtttcaaaattagcctggttggccaggcgcagtggccactcctgtaatcccagcataaagctggagggagcatgggtgggggcgagatagggccagcgaggtaagctgcggctggggcatggagaggccagtgtgacccgggaatggatttggagtttattcacaggatgagggagaaaggcgggggctggagtgttttaagccagtgatgacatgctcagatctctctggcagaggggagctttgagggtgaggcaaaaggacagtgagagatgaaggtgccaggacctaagttggtgggaactgggacaaaggcctggggcagaccaaagacaaatttcaaacagaaaaaaaccctgacaactgtgtgtggcaaggagggtgagggatggggaggttgactccagctctgtaattcccccttgcacagaggaagtgatcgcaggggaggatccggcgtgggcaggtggagcgggaggtgcctggggatgtgcagtcgggttgaggggtgtgcagaccaggacagcggtggggctcagggcaagaggtgtggagggtccttcctcttggtggtcactgaagtcccctttggtggagaagaccaacccaggagagtctacatagtgataagggaagacactgatgatgaccccaaggggtaccaggcttaaaatctggattgagagagagagagccctgaaaaaggaatagaaagaatcctcagagcaggaacaccggctgagtgtggcctcccggaaatcagagagacagactgaaggaggagatcacgtgtgtgaaatgtctctgaggactgaaaagtgttaaatgtagcagtaagaactgattatcttggcaagagcaggtttaggggagtatggaaggtggaagccaactgcaggtgaggaagccgagtttatgttttattagttgatgggaaggagggagggaacaggctgggagattgtctgtcctttgtagttaggatccagcagctcagcttgggtccctgttttagatttgggcttaatttttttttttttggtagagacagggtctcactattttgtccaggctggactcaaactcctggcctcaagtgatcctcccgtctcggcctcccaaagtgctgggattccaggcatgagccactgttcccggccagatttgggttttgatgatcccgaggctcttctctgttgcaacacagaatacaactaaattgcactcctttattgccctctttaaggtgttcccgttgcctcctgtttattgagatcttgagatgctcgattgatgggtgcattgatttgcataacttagttcttctcacggggaaggaatgagtcccgtctgtctgcctggggagggtgacattggaatgctgttcttaggcctctgtgagatgttctgatgcctcattctccagagcaaggactctgtccgtttatgccagcaagtgcttgattctttacccaactcccttcctgaaagccccttgcagctctctggtgcttgggcacgatccaagccaaaaattctgtacattgcatgggtataaaccgacgggggctctggtcaagtcatggagtagatggtggtccaggagtcctggttggcacccccaaggctaggtcagatttggggcccgggcagtccaggagaagtgcatttatgtcagcttggggaggtcgcaaatccgtgctgtgtccaagcccaccaggaatggattcaggtgtttataggtgtggggattcaccaggttaaacccaggcccgtgtgagcaccactggccctagaattagcctcacctggcgccggcctttttgtgatggctcctgattaaatacccactaattctggatctgctggtgaccacagagttcacctgatgggtcccctacaggcagcattcaatccaggaagtgccagcatcacatggtgacttctggtagctgtaacatttagtgactgtctccatgtcatgcacaggggtgacatcgagaccctcttatgcctgggaagttcctgctgtcaatgcagaatattctctttttttttttttttttgagacggagtctcgctctgtcgcccaggctggagtgcagtgggcgatctcggctcactgcaagctccgcctcccaggttcacgccattctcctgcctcagcctcccgagtagctgggactacaggcgcccgctaccacgcccggctaattttttgtatttttagtagagacagggtttcactgtgttagccaggatggtttcgatctcctgacctcgtgatccgcccgcctcagcctcccagagtgttgggattacaggcgtgagccaccgcgcccggcccagaatattctttgaagaaaaaaaaaacattagagatgggatttcactgtgttgcccagtctggtctcaaattcctagcctcaagtgatcctcccatcttggcctcctaaagtgctgggattacaggcatgagccactgtgcccagcctagaatattcttttttttttttcttgagatggagtcttgctctgttgcccaggctggagtgctgtggcgcaatctcggctcactgcaacctcctcctcccaagttcatgccattctcctgactcagcctccggagtagctgggactacaggtgcccgccaccatgcccggctaattttttttgtatttttagtagagacagggtttcactgtgttagccaggatggtctcgatctcctgacctcgtgatcagccagcctcggcctcccaaagtgctgggattacaggcgtgagccaccgcgcccggcccttagaatattcttgaattatcttattttttatttttattttttgagacagagtctcactgtgacacccaggctggagtgcaatggcatgatctcagctcactgcaacatcaatctcccaggttcaagcgattctcgtgcctcagcctcccaagtagctgggactacaggtgtgtgccaccacacctggctaatttttgtattttcaatagaaatggggtttcaccatgttggccaggctagtctcaaactcctgacctcaagtgaagtcccacctcagtctcccaaagtgctggaattacaggcgtgagctactgcgcccagactattcttgaacaatttaacctgttttggactcaagggtacctgggtggctctggttcccgccctggtttccctgggagtgcttgtggccattgggatactcccaagaaggtgatccaaggagctgagaaggggagggatcagctgctcatggggccatggcctgttgcctccaggaggagctcgcagccctcttctctgagctgaagcaggagcagaagaaggtggatgagctcatcgccaaactggtgaaaaaccggacccgaatcgtcgtgagtgccccttccctctgcccctgcctgggaccggccaccttcactttcctgtagagctcagttctcattggtcctttacagaaaaccatgccttccatataaagccagaactcaaagcattccggggcggggtggggaaagcgcaaatcctctcaggggaattcaacccagttgtcgttaggactggctccaagttggcttttgccctctgtgtccttgagactgagataacccaggacttgagtctcgggggtaaacagctgaaagcatgggcgtgactcctccgcccctgtgccacctgtgtctgcttgaccttgccagcctgtcatggtgccctcccagtacctgggtgcgcaggcgtggagaggctggcagccctgggccctggctgatctcctgaactgagaggcacatggggctgggacgcatagtgccccggccctggaggtggctgtgaaacagaaacaggagccgagcaagatccagaagcacttggcctccctcatttaccctcctcacccttgcgcggcaggcggtatcagccctgcctggtggaggcggagctcagggttctgcagggagttctggctccctcacagcaaagcccgctcgcccagggccttcctgctttccttcagttgtggaactctgggatatgcacatttaatagctgaaataggcaaagtggggtgtggtggcgtgcatctgtaatcccagcaactcgggaggctgaggcgggaggattgcttgaggctgggaggtcaaggctacagtgagctatgatcgtgccactgcgctccagcctgggcaacagagtgagaccctgtctgttaaaaaaaaaattaaaaattaaaacaggccaaagcagagcctctccatttgaaatgggagctggggccaccctccccacggccaccgccagggctccccatgcatggggtgaactccctgcccggcgccaggccatgcagcctcccctgagactcaggtcccaggaccaacccggtcaggaaggccctggggacaccgaggccagccagacagagcctggcagctcggctgtgactctgcagtgagcagccctccctgtcccagaatgagtcggatgtcttcagctgggtgatccgccgcgagttccaggagctgcgccacccggtggacgaggagaaggcccgctgcctggaggggatagggggtcacacccgtggcctggtggcctccctggacatgcagctggagcaggcccagggaacccgggagcggctggcccaagccgagtgtgtgctggaacagttcggcaatgaggaccaccatgagttcatctgggtgagtggacagggaggcgtcccatccccatacccgccagggccttccccttcccaacagtgccctggcttcccaccttctagccttaacctccctctctcttgccttccagaagttccactccatggcctccaggtaataaccttggagagagctcagccagggtctggtggctgcgggcacgggcatctcagctccactggttcctccattcagcttaaccagcgcctcccaagcagctgcctatagctggctctataactgagcctggggaagatagaggaaagtcacatccctgccttcaagggtctcgcagacaggtggggaggcagatggtgaactgtgggtacctagaacagcagaagttcactcaagctacagaaatactagaggagggtagctcatgcctgcaatcccagtactttgggaggccaaggcaggagtattgctggaggccgggagttcgagaccagcctggccaatgtagtaacacccccgtctctacaaaaaatacaaaaataaaaaaattagttgggcatggtggcatgcgcctatagtccctgctactcataaggctgaggtgggaggattgcttgagcccaaagtttgatgctgcagtgagtcatgatcatgctactgcatgatccagcctgggtgacagagcgagaccctgtctcagaaaacaaaacactagaggaggagcaggtgtctgggaggcctggcagaggggcacacgcctgatggctgagaagggcccaggacccgagtttgccaggcaagccgagggaacagtcctgtaaaagggggagtggcgtgcggactctggttatgagaagttcagggtggctggatgtaaggcaggatatcaggaggagtgggagctgggagaggtgggaaatggccagaagcaacatccaggagcaccaggcatcccttgcttaccgtcctcacccttgcgcagcaggcagtatcagccctgcctgaaacttgctctgcagattgtgggaagagagcggatccatgttctagacccaacaaacgaacacgtgcagttcccaagccttcctcactccctgtttatgggagactccttgtttctcacatttcttttagtcttagagacaatttggtcaggagacatgggtttaaatgaaggcacagagcctgggcacagcagcttacacctgtaatcccagcactttggaaggccaaggcagaaggatgacttgaggtcaggagatcaagaccagcctggccaacatggtgaaaccctgtctctatgaaaaatacaaaaattagctgggtgtggtggcacatacctgtaatcccagctactcgggaggctgaggcacgagaatctcttgaacctgggaggtggaggttgcagtgagctgagattgctccactgcactccagcctgggtgacagagcaagactccatctcaaaaaaaaaagaaaagaaaacaagaaaaaaaaaagtccgggcatggtggctcatgcctataatcccagcactttatgctcaagtctgcttttttttttttttttttttgagatggagtctcgctctgtcacccaggctggagtgcagtggcacgatctcagctcactgcaacctacacctctcaggttcaagtgatctcctgcctcagcctcccgagtagctgggattacaggtgtgcaccccatgctcagctaatttttttatttttaatatagatggggttttgccatgttgaccatgctggtctcgaactcctgacctcaaatgattcgcctgcctcggcctcccaaagtgctgggattacaggcgtgagccaccgtgcccagccttgagtctttatttttagagacaggatcttgctctgtcacccaggctggagcgcagtggtgcaactgtagctcactgcagccttgacctcccaggctcaagtgatcctcctgcctcagcctcctgagtagctgggacgacaagtgtgtgctaccatacccagctaatatttaaatttttagtagagatgggatcttgctatgttacccaggctggtctgggcctcaagcaatcctcccaccttggcctcccaaagtgttgggattataggtgtgagccactgtgcttagcctcccataaccctttgattcacgatactcataggctaagtgggtcctggaagctccggggtagccttctaaccaagatgctggctctggccactggaagtcaaactgggtgcacagaccagtgagagggcatgagggagcctagcaggggtgaacagcaaccctcagcctccccacagccctgcctctcctcctgcctctcctcggtctcctttgaggattcagcctctcgtcctcaccacttatggtctgagggcctccaggctcctcttctggctgtctacccctccacacccatagctccagtcatcacttccacagggatgactcagaagttccctctccgggagacccgtcccttacaggccacatccagtagcgctccagccattcagcagctccgcctggacgtcaagggcatgtccaaaaccgcgctcatgatcttcctactcccccatccctgagatttatcctgtggctgtggtgtcctgtggctactgtaacaaatgaccacaaacttggtggcttcaaacaaatttaatctctcatggttctgaaggccagatgtccaagatcacgatgacggcaaggccgcgctccctctggagactgtcggggaaaacctgcccctttcctcttcagcttcaggtggtggctgccatgccctggtgtttcctggcctgtgaccgcatcattccaatctctgcctccatcttcacgtggccttttctgtatgtgccggtctaatcttcctctgcttctctcttattttttgttttttgagacagagtctcactctgttgcccaggctggagtgcagtggtgtgatctcggctcactgcaaccgccacttcccaggttcaagcaattcccttaacttagccccctgagtagctgggattacaggcgtgcactcagcaaatttttgtatttttagtagagacgtggtttcaccatgttggctaggctggttgtgaactcctgggctcaagggatccaccagcctcagtctcccaaagtgctgggattacaggtgtgacccactgcgcttctccctataagagaggccttcctctgcctctctcttatagggatacttgtgatgccatgcaggacctgcccagataatccaggataaccttctctccaaatccttcccctgatcactcctacagatctcttccatagaaggtgacatttccaggctctaggaattaggacctgctctctctgggtggccgttgttcactccaccaccccaggtttccccatcctaccaaaagacacagcagcattgtgtcaactgcccaaactgaaaacctatgagttattctcgacctgacctttttcctgagcaagttctgtggatttaacttagcggtcacactgccaacttcaaccgaactccactgccaccaactcagtccaggccaccagttcttgtttaggtgactgccatgacccccattggtctctccctgcctcaactctgtcccctccatcctatatccccacactgtaaccagactgattatttatttatttatttattttttggggaaagaagcttgctctatcccccaggctggagtgcggtggcacaatctcagcttactgcaacctccgcctcccaggttcaaacgattctgcctcagcctcccaagtagctgagattacaggtgtctgccacaatgcctggctaatctttgtatttttagtagagacgggttttgtcatgttggccaggctggtctcaaactcctgacctcaagtgatccacctgccttggcctcccaaagtgctaggattacaggtgtgagccaccgcacctggccagactgatctttaaagaagtatacatgaacacagcactccatgacttaaaacccttaagaggactaccatttatctcaagataaaagaacaaaatcctcactgggcacagtggttcatgcctgtaatcactgctttgggaagccgaggtgggaagatcactttaggccaggagttcgagaccatccatgggcaacatggtgagaccgcatttctacaaaagataaaattagctgggtgtggtggtgcacgtctgtagtcccagctacttggagggtgaagtgggaggatcacttgagccctggagttcgaggctgcagtgagctatgacggtgccactgcactccagcctgggtgacggagtgggacctcatcaaaaacaaaaccgttattgtggctttgaggcctggatcataactacatcatttaatttggccaaaccggcccatttcaggtacccaaataccccacgtgctttcttgcttggctctgggactaatgtggttactggtgcagggtgagtggcaggtatcatgaaccacattgtggacctggagttgctaggaccttttctgccattacacagaaaaatcctccctgagaacacagccattggaggacacatggcagaggaagataagacaataaacagagacacataattatggccagcgtgggggctcacgcctgtaatcccaaaactttgggaggccgaggtgggcagatcacctaaggtcaggagttcgaggccagcctggccaacatggtgaaaccccgtctctactaaaaatacaaaaattagccgggcgtggtggcacgggcctgtagtcctagctactccagagggtgaggcaggagaattgcttgaacctgggaggcggaggttgcagtgagccaagatcgcgacactgcgcgacagagtgagtctttttgtctgaaaaaaaaaaaaaaaatatatatatatatatacacacacatacacacatatatatacacacacacatatatatatgaaatgaccaatacacatgtgaacatattcaacgcaataactgcggttaaacagcagtaaaatcccattatttatccatcagattgacaaagactgaagaactggagaagaagtggcgaaacgggctcgcagcgtcgcattccctaccccagcaggtgcgcccgcagcgtcgcactccctagcccggcaggtgcgcgatcacacacacaccctgcagggggacttcgaccggcacttccggtcccggaagggcatgcccttggaccccggaagtccgggcgggggcagagccgggtgcgctttgcgacagagccgtaaaggcgcgcgggaacatggggctgtacgctgcggtggcaggcgtgctggccggcgtggagagccgccagggctctatcaaggggctggtgtactccagcaacttccaggtagcgggcccgggcgccacaagtaggggtggggggtgaggaacccggggtggggtgggacgggcccggatggggtcgggaggtggggcccggcgaggagggccgggggagcccccgacccagcttgtctccctcggccacacagaacgtgaagcagctgtacgcgctggtgtgcgaaacgcagcgctactccgccgtgctggatgccgtgatctccagcgccggcctcctcagtgcgaagaagctgcagccgcacctggccaagggtaggggcggggcggggaagtgaaccccgacggtcagcgctttgtcatctggtttcagccccgctgccgtgcacggcgggactggagcaagtcgctcacctgaaatgagtatgagcagaccttccctgggttacgaattgagatgggatgaaaatgctttaacttcgagtgttttgaaggattaaataaccgaagtacaaagtagtagtagcggagacagtaaggaagtcgggcgtggcggcgcgcacctgtggtcccagctactcggaaggctgaggggggaggatcacttgagcccaggagttcgaagctgcagtgagctgttatgtggccactgcacttcagcctgggcgacagatctagaccccattctaaaaaaaaacaaaaaccccaaacccacacccacgaaagggtaatgttggcaagaagttgggtgcagaggtctactggtgaacatctgtggggaaagggtctaaggctgggaagcgagacgccaggttccgatcctgttgtgtagttaatttctggtgtggtcttgagtaaggtaccccacctttatctgtaaccatctagtcaggtgatctctttagccattccagtgcccgggctctattagagttagttctaaggcattcatacttcttgcttagggcgtttctgtctttgatccctcatccccaggtgctagtgtatgagttgttgggaaagggctttcgagggggtgggggccaatggaaggctctgttgggacggcaccaggcgaggtgttgagttggctcggctcaaggttcttcggggtgtgagctggcatgaggacctgttggaagtgggatccaggcctggtccaggtgagctggaaggagttgaggggcgggggaggtggggaactttgctcctgcctactcactgctcattgcgtcctacctagcctcccagctgcctcgatttgtgcgtgtgaacactctcaagacctgctccgtttatgtagttatttcaagagacaaggtttctcctatcagggtcgggcttccaggtgagagcttagagccctggctgtcctcatctagggaggtgtctggggtactgggaagagaagtggttggatagttgtgactttgctctctgggctttgttcctacctttccagcagtttctccatctccaaggtttgttttcctcgcatcccttaaacatcgaactcctaggagccccatcctacattcttccggagctctccgttttttctctaactttagctcctgcctcccacctggtgattctcaccgcccagtgtagacttcccttttgcattcttccctccttaggttcacatgaatgcaccacagatgccacagtcgctgcattcatctttcctctcagactttacacttagtacatccccagtttaatctaacagatgtcaccgttttccacccatttggtcaagccagaaaccgagtcatcctaggtgcttccttcccctccctccaatcatttactcctccaccttgagcatctttctcagctccacttttttttttttttttttaggactgagtctcgctctgtcactctcaccgaggctggagtgcagtggcatgatcttggttcactacctccaaggttcatgcaatgctccttcctcagcctcctgcgtagctgggattagaggctcccaccaccatgtccagctaattattgtatttttagtagagatgaggtttcaccatgttgaccaggctggtctcaaactcctgacgtcaggtgatctgcccatcttggcctcccacagtgctgggattacaggcgtgagccacagtgcccggcctccactcctttctcttaattcccccggacactgcctaggttaagcactcatttcttattgggatgaccacaagaacttcccagactggtctctctgcttccagactgtctcactgcattttccttgaggttgactgtaggaagctctaaaggcagatctgatgcattactcctctgctaagccttttttttttttttttttttgagagagttttgctcttgtttcccaggctggatggagtgccctggcgcgatctcggctcaccgcaacctctgcctcctgggttcaagcgattctcctgcttcagccttctgagcagctgggattatgaaggggtggcctgcccctccacatctgtgggatatctcatcaggtgggacaagagactgagaaaagaaataagacacagagacaaagtatagagaaacaacagtgggcccaggagactggcacttagcataccaaggacctgcaccagcactggtctccgagttccctcagtttttattgattattattttcattatctcagcacaaggaatgcggtaggagagcagggtgataataaggagaaggtcagcaaaaaaacctgtgagcaaaggaatctgtgtcataattaagttcaaagggaggtactatgcctggatgtgcacgtaggccagatttatgtttccctccgcccaaacatctgtggagtaaagcataacaaggcagcattgctgccaacatgtctcgcctcccgccatagggtggtttttctcctatctcagaattgaacaaatgtacaatcgggttttataccgagacattcagttcccaggggcaggcaggagacagtgcccttcctctatctcaactgcaaggctttcctcttttactaatccacctcagcacagaccctttacgggtgtcgggctggggcacagcctctcatcccatgaggctatatttcagactatcacatggggagaaccttggacaatacctggctttccagggcagaggtccctgcagcttttcacagtacattgtgcctctggtttattgagactagagaacggcgaagacttttaccaagcatactgcttgtaaacgttttattaacaaggcatgtcctgcacagccctagatcctttaaaccttgattccatacaacacatgtttttgtgagctcaaatttggggcaaagtcacaaattaacagcatctcagccaaccaattgttcaaggtacaggtcaaaatggaatttcttatgtcttccctttctacacagacacagtaacagtctgatctctctttcttttccctacaggattgcaggcatgcagcaccatgcctggctaattttgtatttttagtagagacgggatttctccatgttggccaggctggtctcaaactcctgacctcaggtgatctgcccaccttggcctcccaaaatgctgggattacaggcatgaaccaccgcgcccggccatgctaagtcctttcttggctccattgtgctgtccctcctgcttcctctccaggtccatctgccacagtgctacgtgcaccagcgtgccagcaacagtggctggtctctgccccgtgcctcctccactgggctcacacctgtcttattttgtcctttggtggctctgagaagcagcctctgcccctctccctttcccttactctttgtaagatcctcttccttctgccctaccatgttgcttggacaccagggtggaatagcagagaacggctgcttgtgtttgaattccagctctgccacttcgatagatttctgaactgagacatgtgactctctaggcctatttctgcatgggtcggagagtgggcgggactgctttactgagttatagtgaatgtagttttaacctaagcgcctcacatgactaactcctcatccatcaagaatgagctcagctctcacttccccactcctcacccccctgtaaagtaacctttctccaaggttatgcttcaacaggaatagctaacatttattaaattgtggcacgtaagtatcttggatatattggctcattgaatcctcacacctactattttacagagatgccagtggggcttgagattgaatcacttgcccaggctcccactgctggtaaacagtagagggggctcctgacccatcagtctggcttgacaacccattccctcaactgcggatcccggattcccttatcaccctgttgatttctccatagctgtggtaacatttgttgcatgaatggaccgttgaaatagggcctggcagggagaaattcaggaaatgaatgaatggttcttccctggcagccttgatgacttacaagccctcaaggggaagcattttctcctggactccttgatgccggagctgctggtgtttcccgcccagacagatctgcatgaacacccactgtaccgggccggacacctcattctgcaggacagggtaggcaagaggaatagaaaagggaagaatgtgtaggcacgggaagggcctagcctggggtctctgtttacccggcccctgtgctctgcctgccaggccagctgtctcccagccatgctgctggacccccgccaggctcccatgtcatcgatgcctgtgccgccccaggcaataagaccagtcacttggctgctcttctgaagaaccaagggtgagtgccacaggaggaggaggaggaggacatggggtttgattttgtgcctttcagtgggtaataaaggctgaaaggatgactttcgcttaactctttcctgctgtaccaaagtagttcacggtatttgccccaagctaagctttccccactgcaggtgtgagatgtggatcccttagcccttggggcagagaccccaggccagttacctctgaccctgggccctttaaatataggccgtttcaatattgtgtgtcctggcttaacctgcatgttctggttgtctgtgtcagctgtgacaggcccttagctgctccgtgcatgctcagctcacccctgctctgccctctgccctaggaagatctttgcctttgacctggatgccaagcggctggcatccatggccacgctgctggcctgggttggcgtctcctgctgtgagctggctgaggaggacttcctggcggtctcccccttagatccgcgctatcgtgaggtccactatgtcctgctggatccttcctgcagtggctcgggtgagatggtgagaaggcgtggctgagggactcggaggtccacagcagcttagacctggagtcatctgttttggtcttagttctgacactttaatgggcttgggaccctggagcaaaagttctcctctgtgaggcaaggatttcaggagcgaggatttcaggactgaggcagcctgtgaagctgtgtaaccgagacacgcttttccttaggtatgccgagcagacagctggaggatcccggggcagggacacctagcccggtgcgtctgcatgccctggcagggttccagcagcgagccctgtgccacgcgctcactttcccttccctgcagcggctcgtctactccatgtgctccctctgccaggaggagaatgaagacatggtaccagatgcgctgcagcagaacccgggcgccttcaggtacagggcgggcgccagggtcgtggaggggggggatggggtgaactgctctcttacccagcattggggctgtttctcttgcaggctagctcccgccctgcctgcccggccccaccgaggcctgagcacgttcccgggtgccgagcactgcctccgggcttcccccaagaccacgcttagcggtggcttcttcgttgctgtaattgaacgggtcgagatgccgacgtgagtgagtgggggcatgcttgggaggcgcaggatggtactggcacatctaacatctacacttctctagctcagcctcacaggccaaagcatcagcaccagaacgcacacccagcccagccccaaagagaaagaagagacagcaaagagccgcagccggtgcttgcacaccgccttgcacatagcagaggctccaggctgactccttcctggtgggaaaggaagatgcctgtcctctccgtggaggaccctgggccctcaccgcaggcagcagtttgcattttgaaaggttattgggtcccttcctcgggctgtgttcttgctggtgagcaaaagtgttgcctgcagaaataaaatgcagaacgtactctacgatagatcacagttttttattcttaatgtcacaagcaggagaaaaatctcacattcatactaaaaattccaactagactcaacaggaatgaagtctctatttgtaatggaaagtcccagcctcccgctgccgtccagtgtgtgtactgtacacatccacactcactctcactcagggttcccggaccggctgtcctgcctgcggaactgaggtaaacaagctcaggtactgacactaggagggtctaccttacataaggtacaggtagaagcttgattgattgctaggcccaggcccacccagaccctccaatcctaacaggtatttaggcttgaggttcactccctcctcagctgcacacgcagccaggtataacactcgccctcagtcacaacggggagggggcaccggttacatctacatcacattatttataaaataagaattacatttcatataacatggccagaaggagctctagtcccccaggaaagctgccggggacagcatttgagcctcttctttgcacaggcataacttaactatacagctaattcctagttaatagcatttatacttaaccacctcaatgaaccaagcttgaaggaatttaaaaggcaatttagcttaaatacaaaaataaatttttgttaaaaaacgtttaaatatttttttcttttaatttagacacacgcattcatacttctcccaaagaggttgggcgtgacagcaaggcgcttgggcctggggtatgtggtttcagaaggacggaaggaaaggatgggctgcagagggccctgtttgggaaaaataggattttaaaaatatggttcattaatttaggttttctaacatctactttgggtgacgtagcctccagtgaggtcagttaagtgggacagaaaccgcagagggaagaggtctttgcttcccctgggcccattctccctggctgccagcccttgaagtcagaacaccatgggaaaattcaggagtcggcacttgtagccgtcaagtggtgctactttccacattcaattagcgaggccccagaaaacttgaaacaggaagtccggcactaccaacatgccgccactcatacaactcaactcttcctccaaactcgattcaaagagcaatacacagagcgtcagacaaaggaacacaggacaaggcttgaaacatacaatcctggagaggcagacgagggcccaatggggccaaagggtagctgggcgaggaggcagctgaagcagcggtgggcatcctgcctgctccaagagcttctcccttcacccctggctctgccaggctaacagtcttgagccaccaagctctgaggggccaaactggcagagggttggagatgaaacattgattcaggcttggcaggaagaaaacggcaggagcagcacccactggggtctccaaggcaaagctagattcaagggcatttaaaaaggagggaatcctgcaaggaaccggtgagggacacagcagcaagaaatggggaaacagagtccccagaagggaccagaggaagagaaccacttctcacagctaagccaagcaagataaagctttagggataacccatttcccaaatcccatcaggtgcacaccaccgatccaggcgggctggaccctgccccctccagcgacgacggctctcggggaaaggtggaaggggcgcctgcctaagggtgcgctaagcgggagtcagggcagcggacactatgtacaggtccttagttctccagcctccccagtggaactgttcaagtagaggtcccgggctttggccctccgcatcctgcttccccttccctgaggcttgtgcttcctccagaagggaaagggccccagggctgccactgccccctggcggctgaagccagagatccggggtaggtttgctttacgcagctggaagggtccaaggctctttctagcacgtgccaaggtccagatttagggaaggggtggggggaacagggacaggggacaaaggctactttttgcgggtgtgctgccttcgggcctgcagtcgctgtcgagcccctggggtcttggatcccgcaccaatggaaaatgaaggggccgccgatcctggaaagattcaacaagacctcatcagggcagctgctacctgagactctggctctgggtgcccaaatctctggaaggccaggccagtaataaaacacagggtgcctcaatagggctttccccgctgcgtcagaaacactgtacgggaggagcctcctgaaatgcaaactcccagagtctcagagcgaggcccacgaatccatttttacctggcttcccatgggaggcaaacttccaccccggacagctcctctctgatctctgccatccaactcccatccctgggctgtgctgtactcctaacccgaaatgtctttcctgtgctgaacctgatcttcacggggcctcagagggccaggagcctgccaccccacccaacctctcctcagacagacgagcagggccacagggtggcttgctgcttaccgaacggtccaacaccaacaaagccttgggcgggtgctgaagatgccccaaaggagaggctgctgcccgatgtgcccactccaggcgcaggggtgttctgaccaaaggtgggggtggcggtgcctggaatgaagagaacagagagctggccagtgagcagagggcggaggcaggcgaggagccgggcaggagcctgtgctctgcagggcacttcccacgggaccctcagccccacttctgcttctggggcactcctccatcagcagctgagccagacaaccgagtcttcatgcctggtgccccagctcagcctgcttctcccacccgctaatggccacgccagggcagagaaaaagcccccctgccccgcagccacctcgtgggcctcctgaccatcgctgcagaggggagtactctggggcccccgcctcctagcgtacctgggttggctacctcctctgttcaggccttttccccctagccaccgtcccctcccctctgaagcctggtttgtccgtcctgtgtcttttgtgatgccccgtggtcccctcccttccccggccttgccctgactggctctggctgcctgcccgatgccctctctggcagcccctctgcagggatggctgctctcagggcttggctccggcccggacaaggggaagctccctgtgctcccacgctgcttccacacagtttctcttccttccctaaataccgtaactcaggttcaaatcactttaatctgccatgtcctcatgtcacctgtcaactgccaggtcactccctgattcacagaggacccttggctcactggcttcctccccatcaccactcacggtgacttcgccctgtgaggctgactgatggtcctctcagcccctcggccctgccacccccatgacctcctctccccgacccctgccaccactcctgcagccacactgtcaccacaactgctccggctcccgaatctcctgcaggcaccacccctcctgcagctgacttcacccgctctccactcctgcaccccctgagctgcatcggggcactgacccgctgcccctcctgctgtgcttgctggggtctccacagccgggtggcaccagctgtccgctgaccttagatctatacccagtgtcgctgggaaacacacgccatgctaactggcctcactttaacttcacaatcacaattttccagcccacaaactgcctggaaactgatcacactttttaatatgatgttcctttcccccactgtccaaaatgactatttcaaaagaccccttttttatacactttatcccgaccttccctctcccagattttctctcctacttcacgaagcaaacagaagccatgggatctacattcatcttccacacgggaggaaccatcactgcatccttctgcctgattctgcaatggttttcctgaacacttaagacccaaacacccaaccctggccacaaacaatccttgcctcttggcctccttccacaccactgctttagctcctgccctcctgccatgcttgtctttgttctgctcttcaacataccaaacatgtttctgcctctgggcctttgcatgcgccatcctgggcctgaaaggcatgtccacttgtgctgtgcccacccccaccccacccccatattcagcttacgcttgagacagtcttgctctgtcacctaggccagagtacagtgtggcatgatcttcgctcactgccacctccacctcctgggttgaaacattcttctgcctcagcctcccgagcagctgggattacaggtgggtaccaccatgcccggctaattttttggtatttttagtagagacagggtttcgccaagttgcccaggctggtcttgaactcctgtcctcaagtgatccaccctccttggcctcccaaaatattgggattacaagcatgagccactgcgcccaaccttcagcttacaattgttaagtactcagaaggcctttgaccagttaaatccacaatggctcctccagtcattactacgttagcaaaacatgtatcatgccctggcatctcactgagttctatattcagtgcctgtctcttcactgccacagcataagctccccgagaccacaggcttcacaggcacagcttttcagtgtccggcccgtagcccaagtccacgcccctccttacctccaaacacaggtttgctctcagttgtgctgcccacgttgaaggcaaacggtgtgctctggccggtggtgcccagggcgttctgacctaagccccctgtgaagggggtggaggtggctgtgctcccactctgtcctgctccaaagctgaaagctccggtggtggcgctggagcctggggtggccacgttgatcccaaagctcccactgccagcgggggctgccgaacccccaaacgtgaagggtgatggtgttgtgctgccaaacaccgagctgctgctcccgctgctggcggtctgggtggtggctccaaagccggagctggtggctgcaccgaaggagaagacagcagtggagccgccaaaggcgggctgtgagctggcgggagcgccgaaggcggaagccgtggctttcaatccaaacgccgagtgcgtggcaccgccaaaggtaggctggatgggcgtaggcacgtgcgcaggcacgatcttgatcgtggacgcaggtgcaggtgtgggtgcagtagccggggccggggctgcagagtttccaaaagtgaaagagctgccaaagctgggggtaagggctggcttggcggcccccggtggctgcccctcagcggccccaaatgcgggctgggggttggctcccggatatgatgggagcggggacttggcgcttgagccaaagggaatgttgaacgtgggggtgctcgtgttactgaacgtcagagtgggctggctgctggtggccggggcggaggtggcgagggtgctgccaaaaccactaaagtcggcagcgctgctgctggtggccgttggcacggcagtgggcagggactggctgaaggtggtgactgtggtggttgtgggcaaggcaggaggtttgccaaactggaatatggagcccatggccggggtgaagctggcagcagaggcctggggcgccccgaagaggaaaggctgtgaggcggcagtggcggtgctggtcgtggtactcacactgctgctgctcacactgtttatgccaaagccaaacgcaggcttcgaagcagagtctgtggatggactggcagaggtgatgggagccacagcagaggtggcgctggccaggccagtgaagagcggggcagttgtggtgggagcagtggcgggagtagttgtctgcttgaagaagggagcaggcaagggcacagatgcaggtggccccatgctgctaaagacaggctggaaggtcggggctgtggtgctggtggtcgtggggagggaggagctggagggcgctgtggctgtgactgaagggccaggcggtgtggggccttccttctcactcttgggtggagccgtgaaaatgggcttgaacatgggagatgctgaagatgcagcaggggcggcagggctggaaggtgaggtgttctgtgttccaaacaggaagctttgcttgggggcgggggacggggcagatgtggcttggggtttggtagccgtctctgcttgaagggttggaggtgccttggtgtcagtggctggtaccatggatggagcagggatcagccccagcaaagtggtcgggggtttggagtcaaaggaggggctggggagcagccctggcggccctgactgtgataaacccagcgggggtaggaggctgggtgtctttggaggtgagagggcctcagtggttgctgctccagcagattctggaagaagaatagaaaatgtgaaattggaataaacacttcaaagatgatggtattcagtatttcagcgtcctccccatgcctaccacagagcctgggatccaagagtcagtcaataaactcagctaagtctacactacaggcctgtacagtaaatcaaggaagtgttcattatttccacctcacagatcatcagacagaaggggataaaatggggcctaaatgggggcctaatgtgtagagactaagacagtccaattgtctgaactctgaagttcacgtatgaatctagatatactttatttgcctactaagctcacctgccaggcgctaagagcacacaactatgaatggggaagtctctgcccttgagcagggagggtgcgtacgaaccccaggttaccgtctgataaagaggtgtgcgcgcgcagtgccgtgaaggcctgggccgggaacaccagcagccctcaaagtgctggagggaaaggaagcagtgttgttctggaccagtagttctgacaggcaaggatatcctgaccacgccaccacattcacacttcagaggtgctgcaccgggaagatcattctcatctgacagatgaggaaggcgaggctcagggcagctaagccaggcttcagatcctgagcgtcgcagcaccccttctctaacacttcctgatgtgggctccggcgctgttaaacgtaggcccgctccggtgtgctgagccagggtgcgttcggcctgcagagcaatctccagcgactgacaggcacgacgcccttattcca

SEQ ID NO: 202 - DNA, 32249 bp, Homo sapiens
acataggggtccttagctttcctcttaaaaaaactaattcatggcagaagcagcggctcacgcttgtaatcccagctactggggaggctgaggtgggaggatcacttgggaccaggagtctgagaccagcctgggcaacatagaaagtgccccatctctacaaaaatattaaaaattagccgggcatggtggattgcgcctgtaaatctcttatttgggaggctgaggctggagaatcacttgagcccaggaagcagaggctgcagtgagctatgttcgcaccactgcactccagcctggggaactgagcgagaccccgtttcaaaaacaaaaatccacttcaaacaaagcatttccaaccccattaaatgctttttgaaaatgaggcctctctcttcccaacagagtgcgatgacatggatcctgcggacaaaccgccccagggcgtacctagcaccgaagcatcaggcgccactaggtctccagctccttctcggatgacgtccttcagcacgccccggtcccccgagatgtccagcatcctctgacttaaccgctcgtacagggactgatggagaatgaaagccaggcctcagagccgcagacccacccggccacccctcagcgtctacgcccccacgtctgggccctcacctggccgggggcgtcgtccccttccaggactccctggtttaacgcgcttccccccatgtcctagctgccctccctgtggcgtgagccttcggcctggtgcgccccgctgcccttcctggctgtgactctggtggggttccgaaggcccctttatgcccggcagacccctaccgacggcggcattccattctggggccacgaggaggcactcatcgtttcgttccaaccgccgccaacggccctggccctcgcgagctctggaactacagaggtcgcacggtgagttgccaggtgtggcccgtaatcggagcgcacaaaacatgatgggacacgtaacgggaccacacagggcacattgggcacttgcaggggcgcgaggtggcggcacgtaatgggagcgcgctgagcatgatggggcatgtgcgggagcgccaggcggggcatgtaaccagagcgtgcggggcatgatggggcacggacatggggggttaggtggggcacgtaattggagctcgcggggcaggatggggcatctaactggagcgacagagagcacgatggggcacttacaggggccggaggctgggtacgtaatgagagcgagcgggaaatgatggggcacctaacgagcacgcagagcatgatggggcacgggtgcgaggtggggcgcacagtgggagcgcgtggggcatgatgggacacatggcgaggccgtcagggcacaggggaagcacttttggaacacgtgagtgacagggctgccgcccttgaaggagccctcggagtggctgcgtggtggggcacgtggggcaggttcaggaaaaaggatgcagcatgtgattgcagggcaacctggtgaggacacgagagccacctgccaccagcagggttcagggctcccagctgtgggttacttccaccttctttcactttccctcttccattgtattctagagaatttaggcccagacaagacactgattgattgattgattgattgattgacagaggctcgctctgagcccaggctggagttcagtgatggatctcagctcactgcagccgccacctcctgggctcaagagatcctcctgcctcggcctcccaagtagctgggattacagacgtgcaccaccaggcccagctaatttattttttagtttttaatttgctggtaagatggtttgtagctttgttgcctaggctggtcttgaactcctggcttcaagcgatcctccagtcttgacctcccaaagtgctgggattataggcgtaggctacagccaactttcaatactgccccattgggggttacgtttccaacacatgaaattaggaggatacattcaaaccacagcagtatattatgaccataatattcattaactgtgtaacaggctgggcgcggtggctcacacctgtaatcccagcactttgggagaccagagtgggtagatcactcgaggtcaggagtttgagaccagcctggcccacatgatgaaaccgcctctctactaaaaatacaaaaaattagccggtgtggtggcaggcgcctgtaacctcagctacttgggaggctgaggcaggagaatcacttgaatccgggaggtggaggtggcagtgagcctgattgcaccactgcactccagcctgggcaacaagagcaaaactctgtctcaataaacaaacaaacaaacaaaacctgtataacagagtgtcattgaatttctaaacgttgaaagacttcacattaaaaaaaaactcacaatttaatattattgagtgaaagaaaccagacacaaaagggtacattctatatgatgctgtttatgtgacattcaaaaacaggccacatgacaacatggtaataaggacagtggctgtccttgttaggagttatgactggaaggaggcaggagggagctttctggaaacactgtacatcttgctcttgagagtgcacgtatatacatcaagtgtttatcaagctgtgtggttaagatttgcacacttgtatatgttatacctcgatttaaaaaatctaaataagtaaataaagataccttcaaatcttttaaaaaaaaaaaaaaaagaggccaggttcggcggctcacacctgtaatcccagcactttgggaggctgaggtaggaggattgcttgaggccaggagttcaaaaccagcccaggcaacaaagtgagacccctgtctctactaaagtaaataaaacaataaaataaaaaaaaaaattcgagagatcgaaccatcatctgccagtttgtattagaaaaaaagagagagagaaggaagactgcgtgcaataaggctcatgcctgtaatcccagcactttgggaggccaaggtgggaggattgcttgagcccagaagttgaagaccagcctgggcaacaaagcaagacccggtatctacaaaaaaaattttaaaaattagcttggcatggtggcacgtgcctgtagtcccagctactcaggcagctaaggtaggaggatggcttgagcctaggagttggaggctgcagtgagctgtgaccacgccactgcactccagcctgggcaacagagcaagacactgtcttcccctgccccccagccccccaccccccccaaaaaaggatataagagcaagagattgagattcagaaagaactgtttcccagcacctgtctgctcctgtcggggtcgtgaggtgtggacagtgtgcctagtccctctgtttctgcccctcctccacagtggccaaggccagcacttgaatgttatcagagcaggcccaacaaaggctgcctccccagtcctgtgatgtaacccagtttccacctgattctggtgaccttggggacacaggggtgttgctggggaaggggaggagagaaggggcagagaccaggcagtggtgcaggcgtccagctgcacttcccacttctgactctgtgcctgctgttccctgctgggaagaagaaaagccagtgatgctggcttgaggccatagtgggaggcccagtggatcctgagaagctaggtattccaatgtcgggctctcgctgggggcttctggtgcttcttctgtctcactgacaagctttcataggggagcaggtgggagatcagggtagaggccttgtaggttccaggctctctagaattacctgggagtgtcacctataagtgtagagttctgggtctcactggagaccccctgaagcagatcctttgaaggtgggcctctagaatctctattacacctatgctttcaacagtttcctgaaagtttgggaactgatctagaaggtggggagcttgcctaggttttgctgttcagttctaggtccggatgcatgctggggctggaccttgcattattagtgtcactgcaaatgaccctgcagatggcccctttcatgcttgtctccaaatttgagtaaaaaatgtagacacacacacacacacacacacacacacacacacacgtatcttcaagggaccagttttttcactgcagtcttttgttttacagctgtggaaactgaggcccaaggtcatgtgggttaggactgggatccaggactcaaagtgtttcttataaaattctggtgctccttagggttgagggtggtgggtgagtgctggacagggggaggggagtggacaggactgaggtcggatgcctgtgtttcagcccgggcagtgagtgtggatggcttggcaggtgagcctgctggagctggaggactggcttcagtgtcccatctgcctggaggtcttcaaggagtccctaatgctacagtgcggccactcctactgcaagggctgcctggtttccctgtcctaccacctggacaccaaggtgcgctgccccatgtgctggcaggtggtggacggcagcagctccttgcccaacgtctccctggcctgggtgatcgaagccctgaggctccctggggacccggagcccaaggtctgcgtgcaccaccggaacccgctcagccttttctgcgagaaggaccaggagctcatctgtggcctctgcggtctgctgggctcccaccaacaccacccggtcacgcccgtctccaccgtctgcagccgcatgaaggtggggagtgagggtgcaggcggggcggcggggcccgcggggactggatcctgtgctctctggcgctatcaactggcaccaaaacggatccagctatcctcgatttccctgcagccctgccctggcgcattcattccttagtgtttgagcggcagctaaacccaggtgctggggattgaagctacacgcacaggatgggagctccctggtgtcacgtgctcaccccttcgtgttttttgtttgcagttctggtttgtttctttttctttttttctttctctctctcccgcccccttcccttcctctctctctctctccccctccctcgcccgccccccctttctttttcttctttctttttggagacagcgtctcactctgttgcccaggctggagtgcagtggtgtgatcatggctcactgcagcctccaactcctaggctcaagcaatccacccacctcagcctcccgagcagctgggactacaggtgcacaccaccatgcccagctcattttttatattttgtagaaatggggtctggttatgttgcccaggctggtgttgaattccttggcctccaacgatcttcctgcctgggcctcccaaagtgctggaattataggcatgcaccactgccctacgccccttgtttgtgtctggacactcccctgtttgcactctctggtgcatgagagtggggacttcattttgtcccctggtgtatttcagtgcctggagccatgcctggcacattgtaaatgtccaaaatgctgaatcagtgaattcctgcctttataggccatcaccaaacctagcagatcattctttaagatgagtaataataatacctgactgggtgttatatatataaaacacctgttataaaacacgtgactgggtggcttatgcctataataacagcactttgggaggccgaggtgggtggatcacttgagtccaggagtttgagaccagcctgggcaacatagtgagaccctgcctctacaaaagtttcaaaattagcctggttggccaggcgcagtggccactcctgtaatcccagcataaagctggagggagcatgggtgggggcgagatagggccagcgaggtaagctgcggctggggcatggagaggccagtgtgacccgggaatggatttggagtttattcacaggatgagggagaaaggcgggggctggagtgttttaagccagtgatgacatgctcagatctctctggcagaggggagctttgagggtgaggcaaaaggacagtgagagatgaaggtgccaggacctaagttggtgggaactgggacaaaggcctggggcagaccaaagacaaatttcaaacagaaaaaaaccctgacaactgtgtgtggcaaggagggtgagggatggggaggttgactccagctctgtaattcccccttgcacagaggaagtgatcgcaggggaggatccggcgtgggcaggtggagcgggaggtgcctggggatgtgcagtcgggttgaggggtgtgcagaccaggacagcggtggggctcagggcaagaggtgtggagggtccttcctcttggtggtcactgaagtcccctttggtggagaagaccaacccaggagagtctacatagtgataagggaagacactgatgatgaccccaaggggtaccaggcttaaaatctggattgagagagagagagccctgaaaaaggaatagaaagaatcctcagagcaggaacaccggctgagtgtggcctcccggaaatcagagagacagactgaaggaggagatcacgtgtgtgaaatgtctctgaggactgaaaagtgttaaatgtagcagtaagaactgattatcttggcaagagcaggtttaggggagtatggaaggtggaagccaactgcaggtgaggaagccgagtttatgttttattagttgatgggaaggagggagggaacaggctgggagattgtctgtcctttgtagttaggatccagcagctcagcttgggtccctgttttagatttgggcttaatttttttttttttggtagagacagggtctcactattttgtccaggctggactcaaactcctggcctcaagtgatcctcccgtctcggcctcccaaagtgctgggattccaggcatgagccactgttcccggccagatttgggttttgatgatcccgaggctcttctctgttgcaacacagaatacaactaaattgcactcctttattgccctctttaaggtgttcccgttgcctcctgtttattgagatcttgagatgctcgattgatgggtgcattgatttgcataacttagttcttctcacggggaaggaatgagtcccgtctgtctgcctggggagggtgacattggaatgctgttcttaggcctctgtgagatgttctgatgcctcattctccagagcaaggactctgtccgtttatgccagcaagtgcttgattctttacccaactcccttcctgaaagccccttgcagctctctggtgcttgggcacgatccaagccaaaaattctgtacattgcatgggtataaaccgacgggggctctggtcaagtcatggagtagatggtggtccaggagtcctggttggcacccccaaggctaggtcagatttggggcccgggcagtccaggagaagtgcatttatgtcagcttggggaggtcgcaaatccgtgctgtgtccaagcccaccaggaatggattcaggtgtttataggtgtggggattcaccaggttaaacccaggcccgtgtgagcaccactggccctagaattagcctcacctggcgccggcctttttgtgatggctcctgattaaatacccactaattctggatctgctggtgaccacagagttcacctgatgggtcccctacaggcagcattcaatccaggaagtgccagcatcacatggtgacttctggtagctgtaacatttagtgactgtctccatgtcatgcacaggggtgacatcgagaccctcttatgcctgggaagttcctgctgtcaatgcagaatattctctttttttttttttttttttgagacggagtctcgctctgtcgcccaggctggagtgcagtgggcgatctcggctcactgcaagctccgcctcccaggttcacgccattctcctgcctcagcctcccgagtagctgggactacaggcgcccgctaccacgcccggctaattttttgtatttttagtagagacagggtttcactgtgttagccaggatggtttcgatctcctgacctcgtgatccgcccgcctcagcctcccagagtgttgggattacaggcgtgagccaccgcgcccggcccagaatattctttgaagaaaaaaaaaacattagagatgggatttcactgtgttgcccagtctggtctcaaattcctagcctcaagtgatcctcccatcttggcctcctaaagtgctgggattacaggcatgagccactgtgcccagcctagaatattcttttttttttttcttgagatggagtcttgctctgttgcccaggctggagtgctgtggcgcaatctcggctcactgcaacctcctcctcccaagttcatgccattctcctgactcagcctccggagtagctgggactacaggtgcccgccaccatgcccggctaattttttttgtatttttagtagagacagggtttcactgtgttagccaggatggtctcgatctcctgacctcgtgatcagccagcctcggcctcccaaagtgctgggattacaggcgtgagccaccgcgcccggcccttagaatattcttgaattatcttattttttatttttattttttgagacagagtctcactgtgacacccaggctggagtgcaatggcatgatctcagctcactgcaacatcaatctcccaggttcaagcgattctcgtgcctcagcctcccaagtagctgggactacaggtgtgtgccaccacacctggctaatttttgtattttcaatagaaatggggtttcaccatgttggccaggctagtctcaaactcctgacctcaagtgaagtcccacctcagtctcccaaagtgctggaattacaggcgtgagctactgcgcccagactattcttgaacaatttaacctgttttggactcaagggtacctgggtggctctggttcccgccctggtttccctgggagtgcttgtggccattgggatactcccaagaaggtgatccaaggagctgagaaggggagggatcagctgctcatggggccatggcctgttgcctccaggaggagctcgcagccctcttctctgagctgaagcaggagcagaagaaggtggatgagctcatcgccaaactggtgaaaaaccggacccgaatcgtcgtgagtgccccttccctctgcccctgcctgggaccggccaccttcactttcctgtagagctcagttctcattggtcctttacagaaaaccatgccttccatataaagccagaactcaaagcattccggggcggggtggggaaagcgcaaatcctctcaggggaattcaacccagttgtcgttaggactggctccaagttggcttttgccctctgtgtccttgagactgagataacccaggacttgagtctcgggggtaaacagctgaaagcatgggcgtgactcctccgcccctgtgccacctgtgtctgcttgaccttgccagcctgtcatggtgccctcccagtacctgggtgcgcaggcgtggagaggctggcagccctgggccctggctgatctcctgaactgagaggcacatggggctgggacgcatagtgccccggccctggaggtggctgtgaaacagaaacaggagccgagcaagatccagaagcacttggcctccctcatttaccctcctcacccttgcgcggcaggcggtatcagccctgcctggtggaggcggagctcagggttctgcagggagttctggctccctcacagcaaagcccgctcgcccagggccttcctgctttccttcagttgtggaactctgggatatgcacatttaatagctgaaataggcaaagtggggtgtggtggcgtgcatctgtaatcccagcaactcgggaggctgaggcgggaggattgcttgaggctgggaggtcaaggctacagtgagctatgatcgtgccactgcgctccagcctgggcaacagagtgagaccctgtctgttaaaaaaaaaattaaaaattaaaacaggccaaagcagagcctctccatttgaaatgggagctggggccaccctccccacggccaccgccagggctccccatgcatggggtgaactccctgcccggcgccaggccatgcagcctcccctgagactcaggtcccaggaccaacccggtcaggaaggccctggggacaccgaggccagccagacagagcctggcagctcggctgtgactctgcagtgagcagccctccctgtcccagaatgagtcggatgtcttcagctgggtgatccgccgcgagttccaggagctgcgccacccggtggacgaggagaaggcccgctgcctggaggggatagggggtcacacccgtggcctggtggcctccctggacatgcagctggagcaggcccagggaacccgggagcggctggcccaagccgagtgtgtgctggaacagttcggaaatgaggaccaccatgagttcatctgggtgagtggacagggaggcgtcccatccccatacccgccagggccttccccttcccaacagtgccctggcttcccaccttctagccttaacctccctctctcttgccttccagaagttccactccatggcctccaggtaataaccttggagagagctcagccagggtctggtggctgcgggcacgggcatctcagctccactggttcctccattcagcttaaccagcgcctcccaagcagctgcctatagctggctctataactgagcctggggaagatagaggaaagtcacgtccctgccttcaagggtctcgcagacaggtggggaggcagatggtgaactgtgggtacctagaacagcagaagttcactcaagctacagaaatactagaggagggtagctcatgcctgcaatcccagtactttgggaggccaaggcaggagtattgctggaggccgggagttcgagaccagcctggccaatgtagtaacacccccgtctctacaaaaaatacaaaaataaaaaaattagttgggcatggtggcatgcgcctatagtccctgctactcataaggctgaggtgggaggattgcttgagcccaaagtttgatgctgcagtgagtcatgatcatgctactgcatgatccagcctgggtgacagagcgagaccctgtctcagaaaacaaaacactagaggaggagcaggtgtctgggaggcctggcagaggggcacacgcctgatggctgagaagggcccaggacccgagtttgccaggcaagccgagggaacagtcctgtaaaagggggagtggcgtgcggactctggttatgagaagttcagggtggctggatgtaaggcaggatatcaggaggagtgggagctgggagaggtgggaaatggccagaagcaacatccaggagcaccaggcatcccttgcttaccgtcctcacccttgcgcagcaggcagtatcagccctgcctgaaacttgctctgcagattgtgggaagagagcggatccatgttctagacccaacaaacgaacacgtgcagttcccaagccttcctcactccctgtttatgggagactccttgtttctcacatttcttttagtcttagagacaatttggtcaggagacatgggtttaaatgaaggcacagagcctgggcacagcagcttacacctgtaatcccagcactttggaaggccaaggcagaaggatgacttgaggtcaggagatcaagaccagcctggccaacatggtgaaaccctgtctctatgaaaaatacaaaaattagctgggtgtggtggcacatacctgtaatcccagctactcgggaggctgaggcacaagaatctcttgaacctgggaggtggaggttgcagtgagctgagattgctccactgcactccagcctgggtgacagagcaagactccatctcaaaaaaaaaagaaaagaaaacaagaaaaaaaaaagtccgggcatggtggctcatgcctataatcccagcactttatgctcaagtctgctttttttttttttttttttgagatggagtctcgctctgtcacccaggctggagtgcagtggcacgatctcagctcactgcaacctacacctctcaggttcaagtgatctcctgcctcagcctcccgagtagctgggattacaggtgtgcaccccatgctcagctaatttttttatttttaatatagatggggttttgccatgttgaccatgctggtctcgaactcctgacctcaaatgattcgcctgcctcggcctcccaaagtgctgggattacaggcgtgagccaccgtgcccagccttgagtctttatttttagagacaggatcttgctctgtcacccaggctggagcgcagtggtgcaactgtagctcactgcagccttgacctcccaggctcaagtgatcctcctgcctcagcctcctgagtagctgggacgacaagtgtctgctaccatacccagctaatatttaaatttttagtagagatgggatcttgctatgttacccaggctggtctgggcctcaagcaatcctcccaccttggcctcccaaagtgttgggattataggtgtgagccactgtgcttagcctcccataaccctttgattcacgatactcataggctaagtgggtcctggaagctccggggtagccttctaaccaagatgctggctcgggccactggaagtcaaactgggtgcacagaccagtgagagggcatgagggagcctagcaggggtgaacagcaaccctcagcctccccacagccctgcctctcctcctgcctctcctcggtctcctttgaggattcagcctctcgtcctcaccacttatggtctgagggcctccaggctcctcttctggctgtctacccctccacacccatagctccagtcatcacttccacagggatgactcagaagttccctctccgggagacccgtcccttacaggccacatccagtagcgctccagccattcagcagctccgcctggacgtcaagggcatgtccaaaaccgcgctcatgatcttcctactcccccatccctgagatttatcctgtggctgtggtgtcctgtggctactgtaacaaatgaccacaaacttggtggcttcaaacaaatttaatctctcatggttctgaaggccagatgtccaagatcacgatgatggcaaggccgcgctccctctggagactgtcggggaaaacctgcccctttcctcttcagcttcaggtggtggctgccatgccctggtgtttcctggcctgtgaccgcatcattccaatctctgcctccatcttcacgtggccttttctgtatgtgccggtctaatcttcctctgcttctctcttattttttgttttttgagacagagtctcactctgttgcccaggctggagtgcagtggtgtgatctcggctcactgcaaccgccacttcccaggttcaagcaattcccttaacttagccccctgagtagctgggattacaggcgtgcactcagcaaatttttgtatttttagtagagacgtggtttcaccatgttggctaggctggttgtgaactcctgggctcaagggatccaccagcctcagtctcccaaagtgctgggattacaggtgtgacccactgcgcttctccctataagagaggccttcctctgcctctctcttatagggatacttgtgatgccatgcaggacctgcccagataatccaggataaccttctctccaaatccttcccctgatcactcctacagatctcttccatagaaggtgacatttccaggctctaggaattaggacctgctctctctgggtggccgttgttcactccaccaccccaggtttccccatcctaccaaaagacacagcagcattgtgtcaactgcccaaactgaaaacctatgagttattctcgacctgtcctttttcctgagcaagttctgtggatttaacttagcggtcacactgccaacttcaaccgaactccactgccaccaactcagtccaggccaccagttcttgtttaggtgactgccatgacccccattggtctctccctgcctcaactctgtcccctccatcctatatccccacactgtaaccagactgattatttatttatttatttattttttggggaaagaagcttgctctatcccccaggctggagtgcggtggcacaatctcagcttactgcaacctccgcctcccaggttcaaacgattctgcctcagcctcccaagtagctgagattacaggtgtctgccacaatgcctggctaatctttgtatttttagtagagacgggttttgtcatgttggccaggctggtctcaaactcctgacctcaagtgatccacctgccttggcctcccaaagtgctaggattacaggtgtgagccaccgcacctggccagactgatctttaaagaagtatacatgaacacagcactccatgacttaaaacccttaagaggactaccatttatctcaagatgaaagaacaaaatcctcgctgggcacagtggttcatgcctgtaatcactgctttgggaagccgaggtgggaagatcactttaggccaggagttcgagaccatccatgggcaacatggtgagaccgcatttctacaaaagataaaattagctgggtgtggtggtgcacgtctgtagtcccagctacttggagggtgaagtgggaggatcacttgagccctggagttcgaggctgcagtgagctatgacggtgccactgcactccagcctgggtgacggagtgggacctcatcaaaagcaaaaacaaaaccgttattgtggctttgaggcctggatcataactacatcatttaatttggccaaaccggcccatttcaggtacccaaataccccgtgtgctttcttgcttggctctgggactaatgtggttactggtgcagggtgagtggcaggtatcatgaaccacattgtggacctggagttgctaggaccttttctgccattacacagaaaaatcctccctgagaacacagccattggaggacacatggcagaggaagataagacaataaacagagacacataattatggccagcgtgggggctcacgcctgtaatcccaaaactttgggaggccgaggtgggcagatcacctaaggtcaggagttcgaggccagcctggccaacatggtgaaaccccgtctctactaaaaatacaaaaattagccgggcgtggtggcacgggcctgtagtcctagctactccagagggtgaggcaggagaattgcttgaacctgggaggcggaggttgcagtgagccaagatcgcgacactgcgcgacagagtgagtctttttgtctgaaaaaaaaaaaaatatatatatatatatacacacatacacacataatacacacacacatatatatatgaaatgaccaatacacatgtgaacatattcaacgcaataactgcggttaaacagcagtaaaatcccattatttatccatcagattgacaaagactgaagaactggagaagaagtggcgaaacgggctcgcagcgtcgcattccctaccccagcaggtgcgcccgcagcgtcgcactccctagcccggcaggtgcgcgatcacacacacaccctgcagggggacttcgaccggcacttccggtcccggaagggcatgcccttggaccccggaagtccgggcgggggcagagccgggtgcgctttgcgacagagccgtaaaggcgcgcgggaacatggggctgtacgctgcggtggcaggcgtgctggccggcgtggagagccgccagggctctatcaaggggctggtgtactccagcaacttccaggtagcgggcccgcgcgccacaagtaggggtggggggtgaggaacccggggtggggtgggacgggcccggatggggtcgggaggtggggcccggcgaggagggccgggggagcccccgacccagcttgtctccctcggccacacagaacgtgaagcagctgtacgcgctggtgtgcgaaacgcagcgctactccgccgtgctggatgccgtgatctccagcgccggcctcctcagtgcgaagaagctgcagccgcacctggccaagggtaggggcggggcggggaagtgaaccccgacggtcagcgctttgtcatctggtttcagccccgctgccgtgcacggcgggactggagcaagtcgctcacctgaaatgagtatgagcagaccttccctgggttacgaattgagatgggatgaaaatgctttaacttcgagtgttttgaaggattaaataaccgaagtacaaagtagtagtagcggagacagtaaggaagtcgggcgtggcggcgcgcacctgtggtcccagctactcggaaggctgaggggggaggatcacttgagcccaggagttcgaagctgcagtgagctgtgatgtggccactgcacttcagcctgggcgacagatctagaccccattctaaaaaaaaacaaaaaccccaaacccacacccacgaaagggtaatgttggcaagaagttgggtgcagaggtctactggtgaacatctgtggggaaagggtctaaggctgggaagcgagacgccaggttccgatcctgttgtgtagttaatttctggtgtggtcttgagtaaggtaccccacctttatctgtaaccatctagtcaggtgatctctttagccattccagtgcccgggctctattagagttagttctaaggcattcatacttcttgcttagggcgtttctgtctttgatccctcatccccaggtgctagtgtatgagttgttgggaaagggctttcgagggggtgggggccaatggaaggctctgttgggacggcaccaggcgaggtgttgagttggctcggctcaaggttcttcggggtgtgagctggcatgaggacctgttggaagtgggatccaggcctggtccaggtgagctggaaggagttgaggggcgggggaggtggggaactttgctcctgcctactcactgctcattgcgtcctacctagcctcccagctgcctcgatttgtgcgtgtgaacactctcaagacctgctccgtttatgtagttatttcaagagacaaggtttctcctatcagggtcgggcttccaggtgagagcttagagccctggctgtcctcatctagggaggtgtctggggtactgggaagagaagtggttggatagttgtgactttgctctctgggctttgttcctacctttccagcagtttctccatctccaaggtttgttttcctcgcatcccttaaacatcgaactcctaggagccccatcctacattcttccggagctctccgttttttctctaactttagctcctgcctcccacctggtgattctcaccgcccagtgtagacttcccttttgcattcttccctccttaggttcacatgaatgcaccacagatgccacagtcgctgcattcatctttcctctcagactttacacttagtacatccccagtttaatctaacagatgtcaccgttttccacccatttggtcaagccagaaaccgagtcatcctaggtgcttccttcccctccctccaatcatttactcctccaccttgagcatctttctcagctccactccttttttttttttttttttaggactgagtctcgctctgtcactctcaccgaggctggagtgcagtggcatgatcttggttcactacctccaaggttcatgcaatgctccttcctcagcctcctgcgtagctgggattagaggctcccaccaccatgtccagctaattattgtatttttagtagagatgaggtttcaccatgttgaccaggctggtctcaaactcctgacgtcaggtgatctgcccatcttggcctcccacagtgctgggattacaggcgtgagccacagtgcccggcctccactcctttctcttaattcccccggacactgcctaggttaagcactcatttcttattgggatgaccacaagaacttcccagactggtctctctgcttccagactgtctcactgcattttccttgaggttgactgtaggaagctctaaaggcagatctgatgcattactcctctgctaagcctttttttttttttttttttttttgagagagttttgctcttgtttcccaggctggatggagtgccctggcgcgatcttggctcaccgcaacctctgcctcctgggttcaagcgattctcctgcttcagccttctgagcagctgggattatgaaggggtggcctgcccctccacatctgtgggatatctcatcaggtgggacaagagactgagaaaagaaataagacacagagacaaagtatagagaaacaacagtgggcccaggagactggcacttagcataccaaggacctgcaccagcactggtctccgagttccctcagtttttattgattattattttcattatctcagcacaaggaatgcggtaggagagcagggtgataataaggagaaggtcagcaaaaaaacatgtgagcaaaggaatctgtgtcataattaagttcaaagggaggtactatgcctggatgtgcacgtaggccagatttatgtttccctccgcccaaacatctgtggagtaaagcataacaaggcagcattgctgccaacatgtctcgcctcccgccatagggtggtttttctcctatctcagaattgaacaaatgtacaatcgggttttataccgagacattcagttcccaggggcaggcaggagacagtgcccttcctctatctcaactgcaaggctttcctcttttactaatccacctcagcacagaccctttacgggtgtcgggctggggcacagcctctcatcccatgaggctatatttcagactatcacatggggagaaccttggacaatacctggctttccagggcagaggtccctgcagcttttcacagtacattgtgcctctggtttattgagactagagaacggcgaagacttttaccaagcatactgcttgtaaacgttttattaacaaggcatgtcctgcacagccctagatcctttaaaccttgattccatacaacacatgtttttgtgagctcaaatttggggcaaagtcacaaattaacagcatctcagccaaccaattgttcaaggtacaggtcaaaatggaatttcttatgtcttccctttctacacagacacagtaacagtctgatctctctttcttttccctacaggattgcaggcatgcagcaccatgcctggctaattttgtatttttagtagagacgggatttctccatgttggccaggctggtctcaaactcctgacctcaggtgatctgcccaccttggcctcccaaaatgctgggattacaggcatgaaccaccgcgcccggccatgctaagtcctttcttggctccattgtgctgtccctcctgcttcctctccaggtccatctgccacagtgctacgtgcaccagcgtgccagcaacagtggctggtctctgccccgtgcctcctccactgggctcacacctgtcttattttgtcctttggtggctctgagaagcagcctctgcccctctccctttcccttactctttgtaagatcctcttccttctgccctaccatgttgcttggacaccagggtggaatagcagagaacggctgcttgtgtttgaattccagctctgccacttcgatagatttctgaactgagacatgtgactccctaggcctatttctgcatgggtcggagagtgggcgggactgctttactgagttatagtgaatgtagttttaacctaagcgcctcacatgactaactcctcatccatcaagaatgagctcagctctcacttccccactcctcacccccctgtaaagtaacctttctccaaggttatgcttcaacaggaatagctaacatttattaaattgtggcacgtaagtatcttggatatattggctcattgaatcctcacacctactattttacagagatgccagtggggcttgagattgaatcacttgcccaggctcccactgctggtaaacagtagagggggctcctgacccataagtctggcttgacaacccattccctcaactgcggatcccggattcccttatcaccctgttgatttctccatagctgtggtaacatttgttgcatgaatggaccgttgaaatagggcctggcagggagaaattcaggaaatgatgaatgaatggttcttccctggcagcctcgatgacttacgagccctcaaggggaagcattttctcctggaccccttgatgccggagctgctggtgtttcccgcccagacagatctgcatgaacacccactgtaccgggccggacacctcattctgcaggacagggtaggcaagaggaatagaaaagggaagaatgtgtaggcacgggaagggcctagcctggggtctctgtttacccggcccctgtgttctgcctgccaggccagctgtctcccagccatgctgctggacccccgccaggctcccatgtcatggatgcctgtgccaccccaggcaataaagaccagtcacttggctgctcttctgaagaaccaagggtgagtgccacaggaggaggaggaggacatggggtttgattttgtgcctttcagtgggtaatgaaggctgaaaggatgactttcgcttaactctttcctgctgcaccaaagtagttcacggtatttgccccaagctaagctttccccactgcaggtgtgagatgtggatcccttagcccttggggcagagaccccaggccagttacctctgaccctgggccctttaaatataggctgtttcaatattgtgtgtcctggcttaacctgcatgttctggttgtctgtgtcagctgtgacaggcccttagctgctccatgcatgctcagctcacccctgctctgccctctgccctaggaagatctttgcctttgacctggatgccaggcggctggcatccatggccacgctgctggcctgggctggcgtctcctgctgtgagctggctgaggaggacttcctggcggtctcccccttagatccgcgctatcgtgaggtccactatgtcctgctggatccttcctgcagtggctcgggtgagatggtgagaaggcgtggctgagggactcagaggtccacagcagcttagacctggagtcatctgttttggtcttagttctgacactttaatgggcttgggaccctggagcaaaagttctcctctgtgaagcgaggatttcaggagcgaggatttcaggactgaggcagcctgtgaagctgtgtaaccgagacacgcttttccttaggtatgccgagcagacagctggaggagcccggggcagggacacctagcccggtgcgtctgcatgccctggcagggttccagcagcgagccctgtgccacgcgctcactttcccttccctgcagcggctcgtctactccatgtgctccctctgccaggaggagaatgaagacatggtacaagatgcgctgcagcagaacccgggcgccttcaggtacagggcgtgcgccagggtcgtggagggggggatggggtgaactgctctcttacccagcattggggctgtttctcttgcaggctagctcccgccctgcctgcccggccccaccgaggcctgagcacgttcccgggtgccgagcactgcctccgggcttcccccaagaccacgcttagcggtggcttcttcgttgctgtaattgaacgggtcgagatgccgacgtgagtgagtgggggcatgcttgggaggcgcaggatggtactggcacatctaacatctacatttctctagctcagcctcacaggccaaagcatcagcaccagaacgcacacccagcccagccccaaagagaaagaagagagcaaaaagctgcagccggtgcttgcacaccgccttgcacatagcagaggctccgggctcactccttcctggtgggaaaggaagatgcctgtcctctccgtggaagaccctgggccctcaccgcaggcagcagtttgcgttttgaaaggttattgggtcccttcctcgggctgtgttcttgctggtgagcaaaagtgttgcctgcagaaataaaatgcagaacgtactctacgatagatcacagttttttattcttaatgtcacaagcaggagaaaaatctcacattcatactaaaaattccaactagactcaacaggaatgaagtctctatttgtaatggaaagtcccagcctcccgctgccgtccagtgcgtgtactgtacacatccacactcattctcactcagggttcccggaccggctgtcctgcctgcggaactgaggtaaactagctcaggtactgacactaggagggtctaccttacataaggtacaggtagaagcttgattgctaggcccaggcccacccagaccctccaatcctaacaggtatttaggcttgaggttcactccctcctcagctgcacacgcagccaggtattaacgaggatcagagctgttctgaggggtgggaaggagcagccccgccaccactcactcaccctcagtcacatcggggagggggcaccagttacatttacatcacattatttataaaataagaattacatttcatataacatggccagaaggagctctagtcccccaggaaagctgccggggacagcatttgagcctcttctttgcacaggcataacttaactatacagctaattcctagttaatagcatttatacttaaccacctcaatgaaccaagcttgaaggaatttaaaaggcaatttagcttaaatacaaaaataaatttttgttaaaaaacgtttaaatatttttttcttttaatttagacacacgcattcatacttctcccaaagaggttgggcgtggcagcaaggcgcttgggcctggggtatgtggtttcagaaggacggaaggaaaggatgggctgcagagggccctgtttgggaaaaataggattttaaaaatatggttcattaatttaggttttctaacatctactttgggtgatgtagcctccagtgaggtcagttaagtgggacagaaacggcagagggaagaggtctttgcttcccctgggcccattctccctggctgccagcccttgaagtcagaacaccatgggaaaattcaggagtcggcacttgtagccgtcaagtggtgctactttccacattcaattagcgaggccccagaaaacttgaaacaggaagtccggcactaccaacatgccgccactcatacaactcaactcttcctccaaactcgattcaaagagcaatacacagagcgtcagacaaaggaacacaggacaaggcttgaaacatacaatcctggagaggcagacgagggcccaatggggccaaagggtagctgggcgaggaggcagctgaagcagcggtgggcatcctgcctgctccaagagcttctcccttcacccctggctctgccaggctaacagtcttgagccaccaagctctgaggggccaaactggcagagggttggagatgaaacattgattcaggcttggcaggaagaaaacggcaggagcagcacccactggggtctccaaggcaaagctagattcaagggcatttaaaaacgaaggaatcctgcaaggaactggtgagggacacagcagcaagaaatggggaaacagagtccccagaagggaccagaggaagagaaccacttctcacagctaagccaagcaagataaagctttacggatagcccatttcccaaatcccatcaggtgcacaccaccgatccaggcgggctggaccctgccccctccagcgacgacggtctcggggaaaggtggaaggggcgcctgcctaagggtgtgctaagcgggagtcagggcagcggacactatgtacaggtgtttccttagttctccagcctccccagtagaactgttcaagtagaggtcccgggctttggccctccgcatcctgcttccccttccctgaggcttgtgcttcctccagaagggaaagggccccagggctgccactgccccctggcggctgaagccagagatccggggtaggtttgctttacgcaactggaagggtccaaggctcttcctagcaggtgccaaggtccagatttagggaaggggtggggggaacagggacaggggacaaaggctactttttgcgggtgtgctgccttcgggcctgcagtcgctgtcgagcccctggggtcttggatcccgcaccaatggaaaatgaaagggccgccgatcctggaaagattcaacaagacctcatcagggcagctgctacctgagactctgactctgggtgcccaaatctctggaaggccaggccagtaataaaacacagggtgcctcaatagggctttccccgctgcatcagaaacactgtacgggagaagcctcctgaaatgcaaactcccagagagtctcagagcgaggcccaagaatccatttttacctggcttcccatgggaggcaaacttccaccccggacagctcctctctgatctctgccatccaactcccatccctgggttgtgctggactcctaacccgaaatgtctttcctgtgctgaacctgatcttcacggggcctcagaggaccaggaacctgccaccccgcccaacccctcctcagacagatgagcagggccacagggtggcttgctgcttaccgaaaggtgcaacaccaacaaagccttgggcgggtgctgaggatgccccaaaggagaggctgctgcctgatgtgcccactccaggcgcaggggtgttcagaccaaaggtgggggtggcggtgcctggaatgaagagaacagagagctggccagtgagcagagggcagaggcaagcgaggagccgggcaggagcctgtgctccgcagggcacttcccacgggaccctcagccccacttctgcttctggggcactcctccatcagcagctgagccagacaaccgagtcttcatgcctggtgccccagctcagcctgcttctcccacccgctaatggccacgccagggcagagaaaaagcccccctgccccgcagccacctcgtgggcctcctgaccatcgctgcagaggggagtactctggggcccccgcctcctagcgtacctgggttggctacctcctctgttcaggccttttaccccagccaccgtcccctcccctctgaagcctggtttgtccgtcccgcgtcttttgtgatgccccgtggtcccctcccttccccggccttgccctgactggctctggctgcctgcccgaggccctctctggcagcccctctgcagggatggctgctctcagggcttggcctccggcccggacaagaggaagctccctgtgctcccacgctgcttccacactgtttctcttccttccctaaataccgtaactcaagttcagatcactttaatctgccatgtcctcatgtcacctgtcaactgccaggtcactccctgattcacagaggacccttggctcactggcttccttcccatcaccactcacggtgacttcgccctgtgaggctgactgatggtcctctcagcccctcaaccctgccacccccatgacctcctctccccgacccctgccaccactcctgcagccacactgtcaccacaactgctccggctcccgaatctcctgtaggcaccacccctcctgcagctgacttcacccgctctccactcctgcaccccctgagctgcatcggggcactgacccgctgcccctcctgctgtgcttgctggggtctccatggccgggtggcaccagctgtccgctgaccttaggtctacacccacagtgtcgctgggaaacacatgccatgctaactggcctcactttaacttcacaatcacaattttccagcccacaaactgcctggaaactgatcacactttttaatatgatgttcctttcccccactgtccaaaatgactatttcaaaagacccctttttttatacactttatcctgaccctctctctcccagattttctctacttcacgaagcaaacagaagccatgggatctacattcatcttccacatgggaggaaccatcactgcatccttctgcctgattctgcaatggttttcctgaacacttaagacccaaacacccaaccctggccacaaacaatccttgcctcttggcctccttccacaccactgctttagctcctgccctcctgccatgcttgtctttgttctgctcttcaacataccaaacatgtttctgcctctgggcctttgcatgcgccatcctgggcctgaaagtcatgtccacttgtgctgtgcccacccccatattcagcttacggtttgttttttgagacagagtcttgctctgtcacccaggccggagtacagtggcatgatcttggctcactgcaacctccaactcctgggttcaaaccattcttgtgcctcagcctcctgagtagctgggattacaggtgggtaccaccacgcccggctaattttttggtatttttagtagagacagggtttcgccaagttgtccaggctagtcttgaactcctggcctcaagtgatgcaccctccttggcctcccaaaatattgggattacaagcgtgagccactgcgcccaaccttcagcttacaattgttaactactcagaaggcctttgaccagttaaatccacaatggctcctccagtcattactacgttagcaaaacatgtatcgttccctggcatctcactgagttctatattcagtgcctgtctcttcactgccacagcataagctccccgagaccacaggcttcgcaggcacagcttttcagtgtccggcccggtagcccaagtccacgcccctccttacctccaaacacaggtttgctctcagttgtgctgctcacgttgaaggcaaacggtgtgctctggccggtggtgcccagggcgttctgacctaagccccctgcgaagggggtggaggtggctgtgctcccactctgtcctgctccaaagctgaaagctccggtggtggtgctggagcctggggtggccacattgatcccaaagctcccactgccagcgggggctgccgaacccccaaacgtgaagggtgatggtgttgtgctgccaaacaccgagctgctgctcccgctgctggcggtctgggtggtggctccaaagccggagctggtggctgcaccgaagaagacagcagtggagccgccaaaggcgggctgtgagctggcgggagcgccgaaggccgaagccgtggctttcaacccaaacgccgagtgcgtggcaccgccaaagataggatggatgggcgtaggcacgtacgcaggcacgaccttgatcatggacggaggtgcaggtgtgggtgcagcagccggggctgcagagtttccaaaagtgaaagagctgccaaagctgggggcaagggccggcttggcggcccccggtggctgcccctcagcggccccaaatgcgggctgggggttggctcccggatatgatgggagcggggacttggcgcttgagccaaagggaatgttgaacgtgggggtgctcgtgttactgaacgtcagagtgggctggctgctggtggccggggcggaggtggcgagggtgctgccaaaaccactaaagtcggcagcgctgctgctggtggccgttggcacggcagtgtgcagggactggctgaaggtggtgactgtggtggttgtgggcaaggcaggaggtttgccaaactggaatatggagcccatggccggggtgaagctggcagcagaggcctggggcgccccgaagaggaaaggctgtgaggcggcagtggcggtgctggtcgtggtactcacactgctgctgctcacactgtttatgccaaagccaaacgcaggcttcgaagcagagtctgtggatggactggcagaggtgatgggagccacagcagaggtggcgctggccaggccagtgaagagcggggcagttgtggtgggagcagtggcgggagtagttgtctgcttgaagaagggagcaggcaagggcacagatgcaggtggccccatgctgctaaagacaggctggaaggtcggggctgtggtgctggtggtcgtggggagggaggagctggagggcgctgtggctgtgactgaagggccaggcggtgtggggccttccttctcactcttgggtggagccgtgaaaatgggcttgaacatgggaggtgctgaagatgcagcaggggcggcagggctggaaggtgaggtgttctgtgttccaaacaggaagctttgcttgggggcgggggacggggcagatgtggcttggggtttggtagccgtctctgcctgaagggttggaggtgccttggtgtcagtggctggtaccatggatggagcagggatcagccccagcaaagtggtcgggggtttggagtcaaaggaggggctggggagcagccctggcggccctgactgtgataaacccagcgggggtaggaggctgggtgtctttggaggtgagagggcctcagtggttgctgctccagcagattctggaagaagaatagaaaatgtgaaattggaataaacacttcaaagatgatggtattcagtatttcagtgtcctccccacgcctaccacagagcctgggatccaagagtcagtcaataaactcagctaagtctacactacaggcctgtacagtaaatcaaggaagtgttatttctacctcacagatcatcagacagaaggggataaaatggggcctaaatgggggcctaatgtgtagagactaagacagtccaattgtctgaactctgaagttcacgtatgaatctagatatactttatttgcctactaagctcacctgccaggcgctaagagcacacaactatgaatggggaagtctctgcccttgagcagggagggtgcgtacgaaccccaggttaccgtctgataaagaggtgtgcgcgcgcagtgccgtgaaggcctgggccgggaacaccagcagccctcgaagtgctggagggaaaggaagcagtgctgttctggaccagtggttctgacaggcaaggatatcctgaccacgccaccacattcacacttcagaggtgccgcacagggaagatcattctcatctgacagatgaggaaggcgaggctcagggcagctacgagccaggcttcagatcctgagcgtcgcagcaccccttctctaacacttcctgatgcgggctctggcgctgttaaacgtgggcccgctccggtgtgctgagccagggtgcgttcggcctgcagagcaatctccagcgactgacaggcacgacgcccttattccaactcaagccggggatgctgctcagaaggctggatccacggccccactccagctcacctgggcagggtggcaggctcgggggagtctgcatcttcttcaagctctctaacagtgggttggtgcttggggccaggagggaggtgggtggggaggcaggtgcagcagcaggcagggtaaaggtaaatgaaggctgagtgataggtggggtctcagtgacagagttcgaggcagcatctaagaaagaaagaaaggtgaagcagtcctggcttgtctgggacttctttccacatgcctgtcggagagcaggctctcagcacagctcatggaggaatgcctgccctcaattgcagtggtccctgctgtccagttcccgtgaagaccaacacggatatctcaggtgagaaagaccacaagaaaacatggaaccctacttgggattttcccagagaaacccattttttcaaacaccaaaataaaaccaaagaaaacagacacctgaaacctctccagtgtgcaacaatctgtgctccttaccgctcttgtcctccaaggcctggttgaaccactgtaatgaagccttcttctctaagtctaggtcctcggcagtgatcgaatagccaagctggggaggtggaggctaccaaagtgaaaaagaagaagtcaggccaatcagaaaaaacgggaaggctaggcatggtggctcacaccggtaatctcagcactttgggaggccaagccagctggatcacttgaggtcaggagtttgaggccggcctggccaacatggtgaaaccccatctctactaaaaacacaaaaaatcaaccaggcgtggtagcaagcacctgtaatcccagctacttgggaggctgaggcaggagaattgcttgaactcaggaggcagaggttacggttagccaaaatcgagccactgcactccagcctgggtgacagagggatgttgtctcaaaaaacaaaaacaaaaataaattagaaaaaaaatcagaagaaacttgtccttagcgttcctaatacttaggagagctaagccggggagggcaggagtagatggacaagaccataccaaggtcagctgttcccctcgccgagaaggcagcagctgaactttccgcttacgctgcccagagctgccaggtgtagactgagaattcgagttttgtttcttccttggggttgtatctgcagctaaagaaagaaatcaagactcgtttgcttccttccctcttccagaaatggatggttgtgtctacccacttcgcatttcacattgagttttcaatgggtatctctgaaaagattcaatcttctatggtttggttgcttggatggtgtttgcaagattaaggcgcgcacacaaaccgcttactgtgcagtaattactgggatcacccacaggtgactcaaactgagcttacctctatccaatcgttagtccctgtctgtagcctttctccctcatcagactataaacttctgaaggagaggaaatctctctctttgtatctaacatgccttagacatagcaatgctcaagaccttttttcaataggtattaatctctacatcctccacaaacacctccaccaccaacagcagcccctcctcctggctcagcaacctacccttttctccctgggactccctgtctgctgccaatggagttgaagaactggaatgatgacacagctcctcttctctgtcaggaaaaaaggaacaatttagtctagaaaggcttcttggctgaagtattaaataatttctcacaccctcctaactaccaagtggccaatgtctaaaacaaccatcatttaagatctcagtatgccaggataaaaaaagtcaacaggaaattccaacagaatgaagggaggctgttcacagaggccatgaagacagcttttgtcttaaaacaagcacaaaacaataatcttcaaaccttacttacaacctatcaagtccctgggagttctagacacagatgtgatccctgagggagtggcattccagccaactgcaagcacctagggggtcagctcgagtcaagaacctgaaggcgactgcccgctgacttgactctctctgctctccactctgcatggcctctgtgcttgcacccgatccctcatgctggagtgggaggcgacagccagaggccactggagtcagtatccaagactgtagggatgacagcacttcgggtgggtactgcattgtacctctcagggacttaagtttctttgattctccaagtcacagcagcacaaagcctaagagccaggttcgtttcccacctttcctcacccccgcctgtccacgcagcaaatgaaaactgcaggagaatgccaagtaccttattttctttgctggcctctccggtgtctgggagcgggaggaggctgggctagagaagggtgatgaactggggccatttctcttccagagctaaaaatcaagagggacatgactgagcctgctgataacttagcatctgaccctcaacacgacaaagtctcttttcaagtgactaaaaaaacattctttatggttaaatggttagtcatgcctgtaatcccagcatgctgggaggccaaggtgggaggatcgcttgagcccaggaatttgagcccagcctgggtaacatagcgagacccctgtctctacaaaaaaaactgaaaaatcagttgggtgtggtggtttgcatctgtggtcccaactactcaggatgctgcagtgagctgagattgccccactgcactccagcctg

SEQ ID NO: 203 - DNA, 289 bp, Homo sapiens
gggggtgctcgtgttactgaacgtcagagtgggctggctgctggtggccggggcggaggtggcgagggtgctgccaaaaccactaaagtcggcagcgctgctgctggtggccgttggcacggcagtgggcagggactggctgaaggtggtgactgtggtggttgtgggcaaggcaggaggtttgccaaactggaatatggagcccatggccggggtgaagctggcagcagaggcctggggcgccccgaagaggaaaggctgtgaggcggcagtggcggtgctggtcgtg

SEQ ID NO: 204 - DNA, 91 bp, Homo sapiens
gaggctgcagtgagctgagattgccccactgcactccagcctgggtgacagagtgagaccctgtctcaaaaaaaaaaaaaaaaaaagaaaa

SEQ ID NO: 205 - DNA, 342 bp, Homo sapiens
gtgagtggcaggtatcatgaaccacattgtggacctggagttgctaggaccttttctgccattacacagaaaaatcctccctgagaacacagccattggaggacacatggcagaggaagataagacaataaacagagacacataattatggccagcgtgggggctcacgcctgtaatcccaaaactttgggaggccgaggtgggcagatcacctaaggtcaggagttcgaggccagcctggccaacatggtgaaaccccgtctctactaaaaatacaaaaattagccgggcgtggtggcacgggcctgtagtcctagctactccagagggtgaggcaggaga

SEQ ID NO: 206 - DNA, 144 bp, Homo sapiens
gagacggagccttgctctgttaccaggctggagtgcagtggcgcgatctcagctcactgcaacctccgcctccctggttcaagcgattctcctgcctcagcctcccgagtagctgggactacaggaacatgccaccacacccag

SEQ ID NO: 207 - DNA, 199 bp, Homo sapiens
tcaccccatctgaaaaataaagcctgggcacttgggcttggtattggtggcctttgcaaggtgtaagatgcgttcccctccttgggccccccttaagcttgtcctgtacatttcatttacaaaggactttcacaagcatgaatggaggtgaccccaccacaccccaggtttcggataaggaaaccgaggcttcagtagg

SEQ ID NO: 208 - DNA, 106 bp, Homo sapiens
atcccagcactttgggaggccaaggggggtggatcacgaggtcaggagatggagaccatcttggctaacacagtgaaatcccatctctactaaaaatacaaaaaaa

SEQ ID NO: 209 - DNA, 199 bp, Homo sapiens; identical to SEQ ID NO: 207

SEQ ID NO: 210 - DNA, 106 bp, Homo sapiens; identical to SEQ ID NO: 208

SEQ ID NO: 211 - DNA, 156 bp, Homo sapiens
ttttttttttttgagacggagccttgctctgttaccaggctggagtgcagtggcgcgatctcagctcactgcaacctccgcctccctggttcaagcgattctcctgcctcagcctcccgagtagctgggactacaggaacatgccaccacacccag

SEQ ID NO: 212 - DNA, 199 bp, Homo sapiens; identical to SEQ ID NO: 207

SEQ ID NO: 213 - DNA, 3205 bp, Homo sapiens
  SITE (1332): n equals a,t,g, or c
  SITE (2352): n equals a,t,g, or c
gttccatctgcaattgagcaccctttctgcagaaagtaaagatggccttgctgagagatcttttgtctctgtgctgactttcctttgtggcaccaatgatgtatttctaacaattttgatatttctaacaattttggtggcaatcgtatggggatacattctcctccgggggcatctctagtcctctttcatgaggaggcaccacaccacctcttgcggtggcctcaggggtaagggaccaagacccacctggtgcgaggaataacccgagctctcagcaatgcagaaagaaactggccagcaacctagcttaaaggatcctcacatactgcagcgatgactttgtgcacagaccaaggaaggcaaagccacaggagccggtaaagtacttccttggtcatgaaattctggagggctaaatgtacatgtgcgtgaatgatcacagataaccctgcttgcggtgttgtttgtgtggatggtgacaagtcctactgctggatggagtgagtgggtcctctctgcggttccatagctacctcatatggcttagggcggatcctgccatgggatttatacctgcacgccaacactaaaaggggcctaattctcccttgggggagcggccagagaggacaacacaagtgggaagtgtgcaagggaccttcagagaggggaagggagaaaccaggtcaacctcccagggcaggcaaggcaagacacccactggtttgaggggttgagccttccaggacaggcaaggcaagacatccctggtttgaggggttgaaccttctgcaaatttcaggtggttgaacctcacacaaacctccggtagtaagaaaaatattcagaactcccctgaaagaggtaagaaaggggtaagaaagaggctaagctccactcctgctggttgctcccctaggggaaggggaaggagaagggagagcagcaacataagtggctggcagaggcagggaaagaccagcagagaggagagagaaactgggagaggaaataagggagagaaagagagagaggcggagagacaaagagggagtcaaagagaaagaggaagaaagagagagagagagatggagaatcagagagtgagagaaagagacagagagataaagaggtagtaaaagagagagagagacagagtcaaggaagagagagaaagagagagatggaagtagtaaagagaaaactgtaccctagtcatttaaaagccagggtaaatttaaaacttgtaattgataattgaaagtcttcttcatgaccctataacactccaataccaccttgttgtcagtgtaaacaggggcgtcgaanagcactgaggccactgacaacctgaagcctttctaataaaaaatccttaacccagtaacccgtagatggcccaaatgcattcaatctgtagcagcaactgctttgctaagagagcaaagtagaaaaataacttttagaggaaacctcattgtgagcacacctcatcaggccagaactaacctaagtcaaacaaacaaacaacaaaacccaaaagctaaaaggtagctcactgactcaagaaccttaaggtatgcggctattctgttagaaaaagtgatttaacgttagccactgaaaattcccttaactcagtaggtttcctaacggggatctaaatcttagttaccatagaaaggtcccaccagacctaggaggaactcccttcaggacaggatgattgacggttcctccttggtgacaggatgatagatggttcctcccaggtgattgagagaaaaggacacaatgggtattcagtaagtgataaggaaactcttgtagaagcagagttaggaaaattgcctaataattggtctgctcaaaggtgggagctgtttgcactcagccaagccttaaaatacttacagattcaggaaggagtcatctatagcaattctaagttaaatttggactaaattaggtcttattaatagcaaaggataattgaaatcccaaacttacaaggttttcaacaaaagtaaaatttgctaaatattaacagtgtcatatgtattatcctaacttctaatcttgtggcctttaacagtccagtccacagacatgaaggaagttcactttggaaaagaatggctatcatctttgaggaaaaaaaaaggggggaggggagaatttatgtaaaaaggaatgttatatggtaaattcttgtcctaaaataaattaactggttgtttaaagaaagcgatgttagcaacaactcagaaagttgaggcatgtcgaagaattgtctgtaaaagttgtgaaaaacaaaattataaaagggaatttatgcaagaaatgttngtatacttaaagtataggcctctgaatgtaaactattgaagaaacagtttatatgcaaggtatgtaaggaaagcaaaataaacttttggtaaaaggattataaggaggcataagaatgtggatttctacctacattaaaaggttaaaaaaattttgttttgaaggtttaagcaagttttgaaactttaattgtaaaggaaattctgtgtgtaaacatattggctaaagttaaaggggtgtcatccagtttttctgtgaactggatattaaaataaaagaacaacaggtttttcttaaaacactaacctgctctttaacaaaaaattataaaaggttaaaaacagtctataaaaatcttaccttatggtcagacattaaaattggatacatatgtcaacaaggttttattaaaattaaatttaacattaatgacacactcatataaaggtaaaatttagcttttctagtataaaatcatatacgaagcactgtcaaatataaaatggtgtttggctttctttggtctaaaaactaataaaaatcggtgctaaagaaaatttatcagcaagaaggcacaaaggactataaagtccactgttgatgtacccacgtttaaaacaaaagatcaatttcttagaaattatatacttggtttatcctccaccttctcttcccttgaaacaaaaggtcttttagcacagatgccgcccttggagtttccagtacatcagcatcagcctggggatcacattctcatcaaaggatagaaagaagggaaactcgggccagccttggaaggaccgtaccttgtgctgctaaccatcgagactgctgttcgtacagcggaaaggga

SEQ ID NO: 214 - DNA, 3213 bp, Homo sapiens
gttccatctgcaattgagcaccctttctgcagaaagtaaagatggccttgctgagagatcttttgtctctgtgctgactttcctttgtggcaccaatgatgtatttctaacaattttgatatttctaacaattttggtggcaatcgtatggggatacattctcctccgggggcatctctagtcctctttcatgaggaggcaccacaccacctcttgcggtggcctcaggggtaagggaccaagacccacctggtgcgaggaataacccgagctctcagcaatgcagaaagaaactggccagcaacctagcttaaaggatcctcacatactgcagcgatgactttgtgcacagaccaaggaaggcaaagccacaggagccggtaaagtacttccttggtcatgaaattctggagggctaaatgtacatgtgcgtgaatgatcacagataaccctgcttgcggtgttgtttgtgtggatggtgacaagtcctactgctggatggagtgagtgggtcctctctgcggttccatagctacctcatatggcttagggcggatcctgccatgggatttatacctgcacgccaacactaaaaggggcctaattctcccttgggggagcggccagagaggacaacacaagtgggaagtgtgcaagggaccttcagagaggggaagggagaaaccaggtcaacctcccagggcaggcaaggcaagacacccactggtttgaggggttgagccttccaggacaggcaaggcaagacatccctggtttgaggggttgaaccttctgcaaatttcaggtggttgaacctcacacaaacctccggtagtaagaaaaatattcagaactcccctgaaagaggtaagaaaggggtaagaaagaggctaagctccactcctgctggttgctcccctaggggaaggggaaggagaagggagagcagcaacataagtggctggcagaggcagggaaagaccagcagagaggagagagaaactgggagaggaaataagggagagaaagagagagaggcggagagacaaagagggagtcaaagagaaagaggaagaaagagagagagagagatggagaatcagagagtgagagaaagagacagagagataaagaggtagtaaaagagagagagagacagagtcaaggaagagagagaaagagagagatggaagtagtaaagagaaaactgtaccctagtcatttaaaagccagggtaaatttaaaacttgtaattgataattgaaagtcttcttcatgaccctataacactccaataccaccttgttgtcagtgtaaacaggggcgtagcccgaaagcactgaggccactgacaacctgaagcctttctaataaaaaatccttaacccagtaacccgtagatggcccaaatgcattcaatctgtagcagcaactgctttgctaagagagcaaagtagaaaaataacttttagaggaaacctcattgtgagcacacctcatcaggccagaactaacctaagtcaaacaaacaaacaacaaaacccaaaagctaaaaggtagctcactgactcaagaaccttaaggtatgcggctattctgttagaaaaagtgatttaacgttagccactgaaaattcccttaactcagtaggtttcctaacggggatctaaatcttagttaccatagaaaggtcccaccagacctaggaggaactcccttcaggacaggatgattgacggttcctccttggtgacaggatgatagatggttcctcccaggtgattgagagaaaaggacacaatgggtattcagtaagtgataaggaaactcttgtagaagcagagttaggaaaattgcctaataattggtctgctcaaaggtgggagctgtttgcactcagccaagccttaaaatacttacagattcaggaaggagtcatctatagcaattctaagttaaatttggactaaattaggtcttattaatagcaaaggataattgaaatcccaaacttacaaggttttcaacaaaagtaaaatttgctaaatattaacagtgtcatatgtattatcctaacttctaatcttgtggcctttaacagtccagtccacagacatgaaggaagttcactttggaaaagaatggctatcatctttgaggaaaaaaaaaggggggaggggagaatttatgtaaaaaggaatgttatatggtaaattcttgtcctaaaataaattaactggttgtttaaagaaagcgatgttagcaacaactcagaaagttgaggcatgtcgaagaattgtctgtaaaagttgtgaaaaacaaaattataaaagggaatttatgcaagaaatgttgtataacttaaaagtaattaggcctcctgaatgtaaaactattgaagaaacagtttatatgcaaggtatgtaaggaaagcaaaataaacttttggtaaaaggattataaggaggcataagaatgtggatttctacctacattaaaaggttaaaaaaattttgttttgaaggtttaagcaagttttgaaactttaattgtaaaggaaattctgtgtgtaaacatattggctaaagttaaaggggtgtcatccagtttttctgtgaactggatattaaaataaaagaacaacaggtttttcttaaaacactaacctgctctttaacaaaaaattataaaaggttaaaaacagtctataaaaatcttaccttatggtcagacattaaaattggatacatatgtcaacaaggttttattaaaattaaatttaacattaatgacacactcatataaaggtaaaatttagcttttctagtataaaatcatatacgaagcactgtcaaatataaaatggtgtttggctttctttggtctaaaaactaataaaaatcggtgctaaagaaaatttatcagcaagaaggcacaaaggactataaagtccactgttgatgtacccacgtttaaaacaaaagatcaatttcttagaaattatatacttggtttatcctccaccttctcttcccttgaaacaaaaggtcttttagcacagatgccgcccttggagtttccagtacatcagcatcagcctggggatcacattctcatcaaaggatagaaagaagggaaactcgggccagccttggaaggaccgtaccttgtgctgctaaccatcgagactgctgttcgtacagcggaaaggga

SEQ ID NO: 215 - DNA, 326 bp, Homo sapiens
ttgggagctttttcaggttggctcccatgaccttttgatatgtgcaccccaccccatacacacacccctcttttttaaagcactttctttctttctggcaccatcacatgcttcaggtttattttatatttttcctgccctagccccaggaacaaccagttctctagtgaatcttgctttcttttattagagaatggtatttagaaaccaagatctggatgctagatgtgttcattgctgctgtttctagcccctcccagtagagatttctaggatatttatgtttgtacactactgcatacacacatctgtgtttccatatttat

SEQ ID NO: 216 - DNA, 4779 bp, Homo sapiens
cggcaccgcgcagggaatcccagcagcggggttctggccccagcacgcgttgcggcagcctggcgagcgtccttgcggcctccaagtgccggtggggtgcgtgcgcagggggcaggtgaactgctgcactttgcacttgctaggctaggttctccgcgggtggggaggcgcgggggcgggggacggccgcgtgtttaatctatcaccagaggtcatccaatggtaattgaaggatgagctgggaggactaggatctccctgtcccaaacacagagtgttttggggggcttgcgtttgggtcactttctgagcctggtactgccgatcatttcagcttcgctgtgaaggtgaatttttctaacaccatctttgtgtgatttagctgtccacagggaatcaaaatgtggaatgagaggatgaaactaatcctttcttttgcactgttaggggttgccataaacaccatttgttaaaaagcataattatgttgggaaagtgcctgatgagacaattaagctgcataaacacactgaaaacaaatgaaaaccagaagacgcccacaccccttgtgtaaagcaattttttgtttacatagaaacgagaggtctgggttgctttattacaacaatgttattaatatctagaaaaacctaatgacagaatttttatgaattttcagtgatgagatgatggacatgatatgaaaacctgcctgcaaacctgagctagctacgaagcctgagctctctctaggttaagatgattaggccaacgaatgatcctggcgaacaagccagtggatttattgaggaagagcaccattatttgcaccagagcacttttagcttaaactctaaagtttaacgcgtgtctcagagttagaccactgtggttggtatccctcacacagggaacagtggttggtatccctcacacagggaacattacctgtcagaaaaagaccctcattaaatatttgttgaatgaattcatgagggcctcatctatttttagttatggtatttaaaagagaccaaagttatgaggtcctgaacttgaagagggaaattattttcttattattttaagatgttttaattcctttagatcatgaatatcatttgaagtatggaaagatgtgtcaaaaatgctattctagagtactaaaaagtatcaaagcaacctccaaaacctgtataattaattttcaacaaaaatcacatttttgatattattgaataatatgtatcagaatatgtatcatctttcaagttacagaattttgtaaaaagactaaactgatttagaaactttggtggaacaaggaggaacttagacaattgtcatgtaaaccatccaaatggcttccttatttatttgtataatgtccatggcatggcctgtagacactttcatttttgctgcaagaatttcttttacaagaatccacatattaaataatcttcctcattttctttttctgcatttccccactaagtctagtttaacaacaaaaaaaacatacctgtttgtaaaatagtacagaccttgaaaacagggataaggctaaggaaaactatgcttaaaatgggataacatactttaatgaaaaactttcacttacatgatgaaattcacgctgaggaccctgccaggtattttccagtgtcgttacaaggtttatatgtatgtgaccatgtacacatggtttcttattttagtcaatctggagattttatgctttagaatttttctaggaatgaaatagtaaagtgctcatattatgactgcttcgtttccaaaaagttatgatttttttatagttaaaacatgaaaatatgaatcaactctagagacacataaaaatttttctcctattccagaaaaatcatgtcttcttccagagtggggctccgtttggctgcctgtttactaaacgtttcagaagccggaagaaaatacattgttgagaacatagcaaaagcagctcttcttgacaaaaatggtaggaaaaacagacaattgaagctgaatattatagtgttttgataatttagtaatttttgtactgtgcacactgtatctacagaacacttttctttctttcttcctgaattttcctccttgctcttgagctgttgcagctctgcgcaactccaggatactgagatagctcagttactcagatgtgcacatatgctcttttccaaatgtctgcatacgctcagcagcgcagctcttaacatttgcgtgtgaatctctgagatgcgtgttgttcaggatattgacaggctcctggggaggatgtatttacataaaagtataatgtttccctcatgggtcgtttatttgatcattaatagaatgagcataatcgtaccttatgctttttattgagcagattaaatgaaaaataaacttgccaaataccaactacttttcccagcactcctgccagcaaagcccatgcaatcattacagtattattatttctaccctcttttctctgtatagacactgttaggcaagtgcatttaaatgatgcgcttaagatcactcagcaatttggtgacagaagactggaactcatgcctccttattccctcggccagtattactatgaaagatactgctctttaaaaaacatttcattttttaaaatgttcctgtggtgacacatggttaggtattatttgtctttactttgacacacacactaatacacacaacagtgtatacaatcatttaaatagaatgctgttattaaatcaataactttttggcaacaggtgaaaccaaccctaaagcctttcagacagtaaattttaatttccgattgtcatttttaatgtggttactgcttttcataagaaagaagtgttttcccccaacccatcttaactgtgagcacatttaagttactgtcttgcaactttgcaggagctagaaatgtctatgaaaattcctgataattgctgataagaaaacttctttggagttggtatgcagctgtgattttgcatgctttttgtggaaagagccagctcgggctcttcattgtcagaaacagtacatctaatgggattgggttgcctgtctctgtgattaagtgaatgtgcagagacatttgtggaagacacacactgatggatgcctgggtctcaactcacagtttttatcagcttattagtggcagcagctcaaatggaattatagctattatactccattacaaataccaaacaatttacttctgctgagattcacactgacagctcctcttgccagcagtaatttcttttctatatgcatgcttaagaaattgcaggagagtgttttattctttcagcatttgattcaattgaatcatatgaaactgagaataaaagcttttcaggagaagatttaggatgaaaaaaattacatcatatctcttttcttccaggagttagagtatgttgaaaaactatataaaataggaagttgcatgatcttcttcttacttcatcttttgtagttttcaaaatgcaaggaaggtagcactagttaagaaaatgaaccttttttttttacaaatattttaaaggcatttatttttaagtgagtggaataaaaccatataaactgtattttttttttctaattaagcaatgtgagcacatttaaatggcctagaaaggtcttaggtaaaggaatctgagtaataaattttagacctacaccagggcaggactctacagatgctcgtttggccatgagtgagtgacatatgtttatcttctcacattattaaaattaatagtgtagggctgttctaagctctgtagttcctgggtgtaacttgtttttcctttcctctgaaaagattaattgttaagctgccaggggacaaggagacaaggtataatagcataaccaaaggtttaattaccgcctgaaaacttttgtccttcactttgaatttgcttttgtaggcttaagggggacttttaagaagcctggaccatgcttgtaaacttcaaaaataactctagggttatgtatggctgccacacaagggaatgtcagctttctcctccaggttacacatattcaagagagtcacaaaccaccaaaagctggaagttgttaacatctgaaggctgttggtggcctccgaaaaggagatggtggactcagaacagtttctaatggacaggtgcatgcgtctcaaaaacctctgctctaggcactaattggtctattctagttttaccagaggtcagatcttgacccaaacagtttagtttctggattttggaaggaaatattgacaaggcctaggtgatgagattgataaggaacaggatttagagccatatgatttggctattgaagaaaggagctaccatcttagactgagttaagggaattttggcaaattcagtagcaagtccaaaagagtgtctcttatagacatcaaaagcttgtgtctgagctgagccatctggttatacaataagatgctgtaagaaaagtggacattgcctctcatgaatttcatgtttattcaatgtcacttccaaaagtcacatcccagaatttttccactaagctaaatttaaatataccagaagaaattaactattaaggttttatcacagaaaaaaaattcttgcacttctgtcttgttttttttacaggaaagaaacatcctcaagtttcagtgctcaatatattttccgatcaagactacaagagatcagtcattacaatagcaacttctgttgataagttggg

SEQ ID NO: 217 - DNA, 16854 bp, Homo sapiens
agtagtcatttagcctctgagttctccttcttcagtccaagttattgataataatcaagccctttatcatttagggtcttattttgccatggcttttgcttagttttgtacagtgtatatgtcaacatgtaaaagccatttcatggtattaagtactgcccaatttaagtccaaacgcagtagaactgaaaactccgcattggttgctttgaaatggtctctctgatgatactggagtggcagagtcgttggagtccagtctgatgcaacgaatctcataaaataaatagtcctatagtcccggctactcagggtgctgaggcaggagaggattgcttgagtccagaaatttgagaccaacctgggcaacatagcaagacctcatctcttaaaaaaaaaatggcaccaagtaaacattagctctttatatggcaccaagtaaacattagctttataagcccagtgtgagctagttagaatttcagatccttttcctgcctgccgaagtgaaaactctgcttggaatcttatgttttatgtgcagtatgttcagattttctagctgggattgtctgacgtctaacttgacttttactcctcttagtcctcccaaaccgaaggaccctgtatctgcagctgtgccagcaccagggagaaacaacagtcagatagcatctggccaaaatcagccccaggcagctgctggctcccaccagctctccatgggccaacctcacaatgctgcagggcccagcccgcatacactgcgccgaggtaagcagccaccgtcctccttgccctcagggaagcctgtgcagacctccttaagttagtgcaaggattcagatggtgaggtttgtggccagatcttttctatgtctgttgtaaaatcccaagcagaaaattcagtcattcaagagaaaagtcattaaagaaaaaggaaaaaatagagaacagaaaagcagacatttagtttttccttaggcgtgacaaagcttaacaaacagtcagttctgcagaaatgctcccagttttcctggtgtcccaagccctcgctctgtttggagactaccacagcctctgtacttctcagctttgtgggtctgggaggcacttttgcttcggaattggggtgaaggctttctaggtcctgattaacagaatctgaactgatccaactgtcttccctgcagtctccaccagcagccagggaatgttaaaactccaagcagatcatgtcgtctcttggttaaactcttcagtggcttccatgcgaacttctcaccctgggttctctgtgctttggtggggcctacctctgagcccagagcttacactccctcctctcaacacactccactcttggttccttgaatgaactaagttcatcccctccttagggcttccagaacattctgtcccatatcttcacatggtttcttcttaccattcaggtctcacctcaaaaatcacttcttccagctgggcgtggtggctcacacctataatcccagcactttgggaggctgaggcaggaagatcgcttgaggccaggagttggagaccaatctggtcaacatagtgagagcccacctctacaaaaaaaattttaaaaattatctgggtgtggtgacacacacctatagtcccagctactcaggaggctgaggcaggaggatcacttgagcccaggaggtcgagcctgcagtgagctatgattgcaccaccgcactccagcctggacaacagagtgagaccccatctctaaaataaaaaagagaggccaggcgcagtggctcacaccagtaatcccagcactttgggaggccggggtgggtggatcacttgagccaggagttcaagcctggccaacatggtgaaaccccatctctactaaaaatacaaaaattagccgggcatggtgcttgcacgcctgtggtcccagctactcaagaggctgaggcaggagaattgcttgaacctgggaggcagaggttgcagtgagccaagattgtgccactgcaccccagcctggccaacagagcaagactctgtcccgaaaaaagaaaaaaaaatggattaaattcactgtgtctgtctatagaagcatggtctttacaaagcactacacaaatgttagtggaatttctacaaatcataggcagggaggcaaatccgagtccactgcttggttgcagacccccactttattcttcttcaggctgcctctctgggccctgtcatcttatcaggatctcagctgatccttgagggaagttagtcttctggacctagattccaggtgtgactctggttttggattaagaagactcttttccttatagccgcattcagagtctttcatgcttcccgaaatcacagctcccaggcttcttcgcaggatgggtttgattcttttttccttccccaccccctgcgcctctgaggtggtctcagacaaggcctccatttctcccagccccctccccctgacactttgctcccacgctccctctccccatcctcttcacacccttaaatttcaggaacgagcttttattcagtatgactttacaattagtattgcttagaacagaaaactagactttttttttaaatgccgatggcagtctggagtacagctaatgtaagctggttggtggtttctgagttccagggttgaaagttccagaccagtgtagcagagtagactttacccttttttctttttttttttcctttcttatgttttttagaggcagggtctcgttttctcacccatgctggaatgcagtggcgtgataatagctcactgcatcctccagccactggactcaagtgatcctcccactttggcctctcaaagtgctggtactacaggcacatgccaccatgcctggctgctttatttttttgtagagtcggggtctcactgtgttgcccaggctggtcttgagtgatcttcctgcctcagccagtcagagtgctgggaatacaggcatgagccaccgagactttacccttttcaatcctgaattctgggccctgtaaacaggcagccggggaataggggaaggaggaagaggaaaaagcattcagggagtccacatgtcatgggcaggagtctcagttctgccccttactagctgtgtgacctattaccaaacactggccctcttcaagcctcagttttcttctctgtgaaaatggggataacagagcttgccctgcaatgagcttatgaaacttgaatgagataatttatataaattataatgtgcataatttatataaaaggccttacttggtactggtgataagagtgatacatgttcatttctttccttcatttccttctccttctttcttagagaaccagtaggatcttagcagagtttgaaaaaggctaaaatctctcctttccccctacccctcccagcccaaaaccagagccccagatctgttgttttccctcctgccctcatcagtcccaggttcctatccctgatctcagctggtgtagggaggagagtgatgtgattcagctctctttagagaaataattctaaggcaactcttccagatttattcatgcttttgtccaggacatatctattaactcaaatggttgcggaattggtagaaattctgttattaagaccaatcaaaccaatcaaactctcaaggagaaggtggcttgggatcaggggtcatgttatatcagggtgaactagtcatgcttggtggtccctcctggctgttctgcctctttctgcgtcttcccatggggccctaatgaggaggctgctaagtgggctgagggcagcacttccgtgtcattggggtggcctctgttaacagttttcttcttattgaactttcaaaacgataggcctttaaagccctttcaaatgtgcataatgtacttaatttttaaaataaacttgtttgtttggagtaattttgaatttatagaaaagttgcaaagataatgctgagagttcccatatgccccttactcagtttcccctgttgttaatgtgttacatgaccatggcacatttaccccagctcagaagtcaacattgggctagtccccccatcccccccaactttttttttttttttgaaatggtctcactctgttgcccaggctggaattcagtggtgtgatcactgcagccttggacttcccaggctcatgggatcctcccacctcagcctcatgagtagctgggattacaggcgcatgccaccacgcccggctaatttttgtagttttttgtagagatggggttttgccacgttgctcaggctggccttgaactcctgcactcaagtgatccgcctgctttggcctcccaaagtgctgagatcacaggcgtgagccactgcaccttgcggttcattaccattaactagactccacattttgttcagatttccctagtttttccactcatgtccattttctgtcccaggatctcatccaggagcccacattatatgtagtcatcgtatcttcttcgtctcctgctgtctgtgacatgttctccgtctttctgtgcttttctatggccttgatggttttggagagtactggtcaggcattttgaagaaaggccttcaatttgtgtttgtcagatgttcttctgatgggttatgggctttggggaggaagacacagtgtggtgccctcctgaccacctctcatcagaggtacatgatgctggtgtaccttattactggtgatgttaaatttgggctcctggccagggttggttgctgcctcactgttcctactgaaaggtgttttttctctttttgtgcagctgttaaaaaacccgctccagcacccccgaaaccgggcaacccacctcctggccaccccgggggccagagttcttcaggaacatctcagcatccacccagtctgtcaccaaagccacccacccgaagcccctctcctcccacccagcacacgggccagcctccaggccagccctccgccccctcccagctctcagcaccccggaggtactccagcagcttgtctccaatccaagctcccaatcacccaccgccgcagccccctacgcaggccacgccactgatgcacaccaaacccaatagccagggccctcccaaccccatggcattgcccagtgagcatggacttgagcagccatctcacacccctccccagactccaacgccccccagtactccgcccctaggaaaacagaaccccagtctgccagctcctcagaccctggcagggggtaaccctgaaactgcacagccacatgctggaaccttaccgagaccgagaccagtaccaaagccaaggaaccggcccagcgtgcccccacccccccaacctcctggtgtccactcagctggggacagcagcctcaccaacacagcaccaacagcttccaagatagtaacaggtaagtaggacatcaatgcccgtatttcctcgtctgctctacattgcttttgtactactacattttatttaagctttgatttatgccaggtgtcagcaaactacacccgcaagccaaaccaaacctgtcctgcagccagtttttgtcattaaagttttattggaacacagctacacccatttgttaacatattgtctgtggctgcattggtgctgaaacagcagagctgggtagtcgtgaccaaagatcctgtggcccacaaagttggaaacatttactgcctggtcctttaagtttgccgacccctgacttatagttgcttgtgtgtttaagacctatgtacgtttacatttttctcaacataatggcttttattccaggtggaaggtattttacaacacgagcatgaactttatttcttagtgaattcctcattaaaatgcttaaacagtacttctaagagtaaaagtgttcatattaagtacagaatttcaggtataactttaaaaaacatgatttatgccaaattgaatgctcccagaagggagatctcagggcactgtcatgttctaatggcttgggagggaagaatcaagattttcctgtagacccagtgggaacctgtttggaagtggtggtgattgtacaggttttagtgggctacctaatggcatatttttaatagtctagaacatgaccattttatttaacatttcaagaatatttccatcccaaatgctctaatttattatttaatttaaggatgaatatgggggtttctagtgtgtttttaaaaatggtaattaggggcctcaaataatttcttacagcagcctagtttaaattgttctaagtggaggcactttcggaaaagaagctgaaatacacctctgggctttccaaccatattgagtgactttgcagctaaaaatgtgccaaggtttccattaacccaaagggtgacggttaactgattctaacagcttttgataacttttttcaggaatataatacataatttgcacatgttataaatggttaataactttttttctgatgccatcagagcttttattttgaaaacaacaaagccatgttggtttgtttgttttgtttcccaatagatgcccttcctagtgccctcacaggtggggaaggtttccaggactaaggtctgtaatggccccgagcagcttgccccatagctcgccccacagctccaaatgctcctgcttagccgtgttttgcatatgtgcttttgaccatgtgctcaggagcagccgtttgaccgtgtgccctgacagccaataggccatccattctgtagcatattgacatttctttatttttatcagaagcactttgagctgcagtgcttcaaattcgaggagtagatgtcagtagatcaagagcctgatttcaagctgctcttgaagagtatcttctttcttaggggccaagcacagtggctcgtgcctctaatcccagtactttgagtggctgaggcaagaggattgcttgagctcaggagttcgagactgcagtgggtagtgattgtgtcactgcacactgcagtccagcctgcatgacagagtgagaccctgcctctttttaaaaaaaaaaaaaaaaaggaatatcttctatctttttggtgagcctcttagcagcagtctactcttcccagtgtgatttacctgtcactgatgggctcaccagcatccaaccaaagaggacccaggtgcagtcagcacgggaggaaattgtgtcctttgtgtcttgagctttaattttaaatttttgtattttaagtgcaagttaactgcatggagcttcttaatttgatattttaaattctcaagaccaaaaaattaaaaaaaatcttccgccaaataccctacactgaattattttaaattcctttgcatcctagcatgcttacgttttgctttattaaaccatatgagctttttaaaaggcactgtgagctcatctaagtctgccgctgggtctacatgtggacagcataaggccctcatcatatgtacagctgctttaatcagctggcctgagccttaggcctactgtgggccccttagccagagtgctcacagcttaggtctgagtaagactttctgtaggaaccgtaagtggaaaaccagagtgtagccttcaaaacagggaggaggcccgggtgcgattccacaatttcatgcttgtgacacaccaaaatgttattatcagatatttccttttatttaaatgaaagattgcaaaccagaattatgcctattttttaataccattgttacccggggtgtatttattccacaagtttagtttactgatctgctacaacactgtaatatactgcctgtaattattagataagtgaaattttacattaaaaatgtgtttcccgaagatactagctatttaaaaaccggtctatgctatgaattctcctaactcaagaaattccaggttaccagagttatctttgtattacagaattaacctgtactatcttaaaatcccctggcctcccactgaaagtacacagaaggccaacatttagaattttttaatctgctagtattgatcatactgctattaaccattcttggatgtagccattgggtttttcaaggaggaaaaaatatataacttccttggacaggatggtcctttattatgacataatgttttcacttagaaaactttagatggacaaattcctgaaaacaggttattcctttagaattggattaagttagagttttaaagagttgggttaaggctaatgggattaagataaactcttggggggagattattgctgccaagcaggtttggcagccaacttctcacagctcagcaccagcactggaggatgccggcattctggcatcattttgagtctcctgttaattgtgactctagagagcagtaagagttttaattcccatgtaaaagagtttacatcttgctatttttgaagtaatagattttagcaaagagtattctaatttaaacattttattaaataatttagatgtatgacctgccatattcagtaagaactgagattggaatatttaatggtaaggaaaaggcacctgattggccaatgcatttttgctacttgatgatcatatttgtgcactcatgcctgttactaactggccaccctaaccctgcctgcttgcatccctactaatagtgcatgcactgaaggaggactggctttgttgatgcttgctgcaatgattcggaatactaagtgtgtacccagatgtggaacaggtggtcacagggctgtccttgttacttctttaatttccattcttttccatatcaggcaagcttgaggtatagtaggaagaacacacattatggagtcagacctgactgagttagaatttcagctcttggtataacataggctaggcacaacctggctgatctgtaaagtggtgacatctgtctaaattgttgaagatgaaataagagaaagtccaagattattctgttagccagttacagttcttaatatacgcgcaatctcggctcactgcaagctccgcctcccaggttcaagcaattctcctgcctcagcctcctgagtacctgggattataggcgcctgccaccacatctggctattttttttatttttagtagagacggggcttcaccatgttggccaggctggtctcgaactcctgaccttaggtgatccggcctcctcagcctcccaaagtgctgggattataggtgtgagccattgtgcctggcctgctatttatcatttttatctagaagaaaatagttttaatcagatttctatgttagattcacatatcagggttttaaaaactcatacgcccggacccggccttctaggacccaaacacaggagactgggggtggaacccaggtatccatattttgattctgatgcaccacttggttttttgaatctcacttctttcatgggttaaaaagacaatgctctgcagaaggagataacatatacattcatataatttagtgagcctgagactgtctgtgaggcgttagtccactgtaccacagatagaccaaatcactcacaaagtagccataagcctggacactttgctggctaatttcatagtgtttgctttttaaactctcacccttcttatgtcatgtaagtaatgcctttttaaaaataagcatgagctggggcacggtggctcacgcctgtaatcccagcactttgggaggctgaggcgggtggatcacttgaggtcaggagttcaagaccagcctggccaacatggggaaaccccatctctactgaaaatacaaaaagttagctgggtgtcgtggtgggtgcctgtaatcccagctacttggggaggccaaggcaggagaactgcttgaacccaggaggtggaggtcgcagtgagctgagatcgtgccactacactccagcctgggtgacagagtgagactctgtctcaaataaataaaaataagcatggatattaaaactcttgagaaatggaaataataagaaatcaactgtagctatacaattgaaaaagtctgccatttatattctactttttttcttttctcctcttctcttctcttctcttctcttttcttttcttttcttttttttttttcagacggagtctcactctgttccccaggctggagtgcagtggcacgatcttggctcactgcaagctccgcctcctgggttcacaccattcttctgcctcagcctcccgagtagctgggactacaggcgcccaccaccacgcccagctaattttttgtatttttagtagagacagggtttcaccatgttagccaagatggtctcgatctgctgaccttgtgatctgcccgtctcggcctcccaaagtgctgggattacaggcgtgagccaccacacccgcccctttttttcttttagtttttctagaaggcaaggaggtacatgagcataattatttgacatagacagatttggatccttttatttcactttacatcatatgctcgttctcatgtgataatgtaatttttagaaccatgtttttcagtgactacataatgtttcatcaaccagatgtattattactcctagttggatatttaagtggcttctgtttctacttgcagtttatttttaataagtagataatcagaattgtgtcaagataacatccagtgagacttgaacagaatcactcctgaatagttgactcagagtctctaatagccctagaaaactgacgagaaatcatcagttcctgataaaattacacaattctacttcaaccaaagaggatcaaagccagattggttggactgtcattcttctgtttatttattttgtgtattttttgagacagagtcttgctctgtcacccaggctggagtgcagtggtgcaatcttggcacacggcaacccctgccttcctggtttaagcagttctcttgcctcagcctcccaagtagctgggattataggcaggtgtggcaacacctggctgatttttgtatttttagtagagacagggttttgccatattggccaggctggtctccaactcatgacttcaagtgatccactcacttctgcctcccaaagtgctaggattacaggcatgagccaccgcacctggccccatcattcttaatcaccctaacattttccctctttcccaaaagagttgtgtatatccttgggtgaggatcctgaaagtgaagacattatctgaggaaataatggtttgggtcttaaacactctggttagagctaagtttatatgacaggtattacattgtaaaaaggagaaaaaggttattttagaaagacacctgttagaacctgcttttttttttatttttttttatttttgagactgagtcttaccccgttgctcagaatggaatgcagtggtgcgatctcagctcactgtgacctccacctcccaggttcaagcgattctcctgcctcagcctcctgagtagctgggattacaggcactcactaccgtgctcggctaatttttgtatttttagtatagacggggtttcaccatgttggccaggctggtcttgaactcctgacctcaggtgatctgcctgcctcggcctcccaaagtgctgggattacaggcatgagctaccacacccagccagaacctgctttctaaaagcaccctaaacctctttggttgtgaatttatatattctctgccttccaagggctggtctttgaggatattgcttggaactaagttcatacagtagatattttatttaaaaaaaaaaaaaacagaaaagagacctccaataaaaggtttcttttttgtctgattttttgcttttttttaattttgaaatataatacttgtcatataaacttagctccaagcagtatgctcaaagaccagcccttcttggaatgcaaataatatataaattcatagccagagacgtttagaggtgtttaaagaaaaccaggttcttacaagtgtctttctaaaataacctttatctcttttttacaacaatcaaccagagtgtttaagactcaaaccgttcactggtgaaggaaggcattccctgagactctaggtctgagaagagggatgggtggtggagagggggagggagtttattcgccctgcagttgtgcctgcaccacttactttcaagggcatatttggatctgttacttgtcaaagtggctatcagaatcaccttggacttcttgaagggtgagttcacaaccgagaaagcacatattcaaaattgttgaagtaataagtaaatcttctagaaccttaccctcagtgataacattccacttctagctcttaaatacccacttctgtttcctggatgagatactcagtgcaggaaggaacctgggttacatttgtcagagccccaaatctgagatgaactgtatcaagttctgcctttgggctgaggctggttactggaggtcatcctctgtttctctctttttttttttttttttttttaaaaaaaagagagacagggtcttgctctgttgcccaggctagagtgcagcggtgtgattccagtccactgcagccttgacctcctgggctcaagcgaatctcccaagtagctggaaggtggaactagaggcatgcaccaccacacccggctaatttttgtgtttttcttatagagacggagtctcatgttgcctgggctggtctcgaacttctgggctcacaccatcatcccaccacgcccagcctattttgtttttttaaatacaatatcttttgtatgaacttagctccaagcatatgctcagaaaccagcccttcttggagtgcagttaatatacgagttcatagccagaaagatttagaggtgtttcagacaaaccaggttcttacaggtgtctttctgaaataaccattttctcctttttacaacaaaccagagtgtttgtaagactgaaacaatgatcttggataatgtctttgaaggccctcacccagggatttacagactcctctggggaggagggaaaatgtaatgcgaagagccagagtgcaaccaatctggctttgatcctctttggtccacactggctgtgtcaccttgggcaaggaatagagcctctgagtctccctttcttatttctgctgccttaggattagttagtgggggttcagtgagacgatgtaataaagtgtgggtgtatagtacagtctctggtgtaagtaagtgctctatagtaatgtcagctactgaggctgggtgtggtggctcatgctggtaatcccagcactttggggagccgaggtgggaggattgcttgaggccaggagttcaagaccagcccagtcaacatggtgaaaccttgtctctaccaaaaataaaaaaaattagccaggcatggtggcgtatgcttgtagtcctagctactcgggaggctgaggtgggaggatcagttgagcccaggaggtggaggctgcagtgagctgagattgcacgactgcactccagcctgggcaaaagagcaagaccccatctcaaaaaaaaaatttttttttttaatgttagctactgtgatgaagtctctttctgaaaactggttctgtacaggttgccgtaattctttctactttttgtgtgtaaacaaagtcattgtttctttcagggactgattcatgtaggaatagagaggggctggggaaaccagatggggcaggtgggcggcagagtaagggatttcctttatgccccaaaacacattttttccccttgaattaataatgtgtgtggatcataaatagaaaaattcagagaggcacaaatctaaaaattatgtatatgtgatgtataagaaaaagagagcagctgtggaggggcttggtggctgataggcgttagcttgcatgtgaatacagatattaacaagtagaaatctcatccgtatacacagtgcctttgcatcatgcattccccgccaagtcatgtcggttccatagtttctggtaaactctgggctgagaagagacacgggctggtagccccttctgtttttgggggccaagataatggggaaaggattgcatttgcagtgattttcttatacgtcgtcttcaagtcacagctacttctttgcctgaggatgtaagaatggaggattggaaagatggttgctctagatgactcttcatgcatccatccaaccatccaagtgtgcagctacaaaatttcttgaacatctgctatttgccggtcactgttttaggtactgaggatacactgtgaacaagacagacacagtccctgccttcgttgacttctgttctgcttaggacaaatccaagacagcccctattctgtgcatacagaccacctttggctgcaccataggctggtgcagttctgcacagtgtcattggttttatagttatcacaagacctgaattgtctgaaatgacattcagcacctgaactctttgacactttggcacctccataaatctagaaatttctctgagttgtggtgcataggaaaccttgagggacaacccaggagtaactgtgagaaaaagggtgtcccagggagtaaatagatctcacagctcagaactgtagggacaggaaggtggaaggggtaggagctggaacaagtctccaagcagtgagcttccccaaagtgcaccagcgttttcaagctgtgcctgcgtagacgggagcaggtcgaacagaaatatagtcaaaactagctcccgtcaaggacagacaggatgtcattttgcaccacagcaagtaggggaaagcagctctcaagcctaactgtgaaacgcccccacaaaccacctcctcctcccactccctcactgctgcctgccatggctacctctaacgcagcaaagcaaaactacaaaacatctctcttctctcttacaccagccctaaaatacctaatgaggctctcataatttgccagaacccacatctacgagagaagccagcccttttgtcttaattaggatccccttggtctgcccacttgaccgtgggcttcattgaggctgtgcctgtcttgttcagtgctgcgtcctcagcaggtagaatggtgcctggcacctgggaggtgctcagtaaatatttgttcatgcataaatgaatctgagacccactggcctctgggaagagcataggagagggggacaacagcatgaggaccatatgtttgccatcttgctgaaggaatttcagccaacataataagacatgaaaatggcattcgaggtgtattagacagacaaggggatgttagtgtttgcaggagacttggtctgcctcagtgatgtcagtcagcagtgattgtgattccccaggggacactcggcagcatctggagacattttagtttaaacttccccagtgatctgtgatgtacaggagacactttcggttgtcacactgggggaggaggctgcatgtcactggcatctgttgggtgacacctacaatgcacaggacaaccacaacaaataattcaggcccaaatgttgctggtgctgagggtgaggtcctagtgttagtaacaggaggaaaacccagcagtctggaggagagacctcttcccagggcagcccaggggccatcaggagggttcatctcatgcattagaggtcttgggaagaatgaggcttcctttcctccatcaaagcaagcaaatcctttaaaagctgcatctccaagggctgctccgggctcatagcaagcaacgtcggagcccagaggcaaggctgtgctactcagctgccctctggggtcacaaaggcttcacttggcttctaagagctgatgaggcctctcgcaagggaccctgtgtgcatgggctgaccctgaaacttcccagcctctcttcttctcagagcaccctcaggtggcctctcgggggttacccctcattgataccatgtctcctcgtgtttttgtccagactccaattccagggtttcagaaccgcatcgcagcatctttcctgaaatgcactcagactcagccagcaaagacgtgcctggccgcatcctgctggatatagacaatgataccgagagcactgccctgtgaagaaagccctttcccagccctccaccacttccaccctggcgagtggagcaggggcaggcgaacctctttctttgcagaccgaacagtgaaaagctttcagtggaggacaaaggagggcctcactgtgcgggacctggccttctgcacggcccaaggagaacctggaggccaccactaaagctgaatgacctgtgtcttgaagaagttggctttctttacatgggaaggaaatcatgccaaaaaaatccaaaacaaagaagtacctggagtggagagagtattcctgctgaaacgcgcataggaagcttttgtccctgctgttaatgcgggcagcacctacagcaacttggaatgagtaagaagcagtgcgttaactatctatttaataaaatgcgctcattatgcaagtcgcctactctctgctacctggacgttcattcttatgtattaggagggaggctgcgctccttcagacttgctgcagaatcattttgtatcatgtatggtctgtgtctccccagtcccctcagaaccatgcccatggatggtgactgctggctctgtcacctcatcaaactggatgtgacccatgccgcctcgttggattgtcggaatgtagacagaaatgtactgttcttttttttttttttaaacaatgtaattgctacttgataaggaccgaacattattctagtttcatgtttaatttgaattaaatatattctgtggtttatatgaaaacttc

SEQ ID NO: 218 - DNA, 2419 bp, Homo sapiens
caagacctgaattgtctgaaatgacattcagcacctgaactctttgacactttggcacctccataaatctagaaatttctctgagttgtggtgcataggaaaccttgagggacaacccaggagtaactgtgagaaaaaaggtgtcccagggagtaaatagatctcacagctcagaactgtagggacaggaaggtggaagggggtaggagctggaacaagtctccaagcagtgagcttccccaaagtgcaccagcgttttcaagctgtgcctgcgtagacgggagcaggtcgaacagaaatatagtcaaaactagctcccgtcaaggacagacaggatgtcattttgcaccacagcaagtaggggaaagcagctctcaagcctaactgtgaaacgcccccacaaaccacctcctcctcccactccctcactgctgcctgccatggctacctctaacgcagcaaagcaaaactacaaaacatctctcttctctcttacaccagccctaaaatacctaatgaggctctcataatttgccagaacccacatctacgagagaagccagcccttttgtcttaattaggatccccttggtctgcccacttgaccgtgggcttcattgaggctgtgcctgtcttgttcagtgctgcgtcctcagcaggtagaatggtgcctggcacctgggaggtgctcagtaaatatttgttcatgcataaatgaatctgagacccactggcctctgggaagagcataggagagggggacaacagcatgaggaccatatgtttgccatcttgctgaaggaatttcagccaacataataagacatgaaaatggcattcgaggtgtattagacagacaaggggatgttagtgtttgcaggagacttggtctgcctcagtgatgtcagtcagcagtgattgtgattccccaggggacactcggcagcatctggagacattttagtttaaacttccccagtgatctgtgatgtacaggagacactttcggttgtcacactgggggaggaggctgcatgtcactggcatctgttgggtgacacctacaatgcacaggacaaccacaacaaataattcaggcccaaatgttgctggtgctgagggtgaggtcctagtgttagtaacaggaggaaaacccagcagtctggaggagagacctcttcccagggcagcccaggggccatcaggagggttcatctcatgcattagaggtcttgggaagaatgaggcttcctttcctccatcaaagcaagcaaatcctttaaaagctgcatctccaagggctgctccgggctcatagcaagcaacgtcggagcccagaggcaaggctgtgctactcagctgccctctggggtcacaaaggcttcacttggcttctaagagctgatgaggcctctcgcaagggaccctgtgtgcatgggctgaccctgaaacttcccagcctctcttcttctcagagcaccctcaggtggcctctcgggggttacccctcattgataccatgtctcctcgtgtttttgtccagactccaattccagggtttcagaaccgcatcgcagcatctttcctgaaatgcactcagactcagccagcaaagacgtgcctggccgcatcctgctggatatagacaatgataccgagagcactgccctgtgaagaaagccctttcccagccctccaccacttccaccctggcgagtggagcaggggcaggcgaacctctttctttgcagaccgaacagtgaaaagctttcagtggaggacaaaggagggcctcactgtgcgggacctggccttctgcacggcccaaggagaacctggaggccaccactaaagctgaatgacctgtgtcttgaagaagttggctttctttacatgggaaggaaatcatgccaaaaaaatccaaaacaaagaagtacctggagtggagagagtattcctgctgaaacgcgcataggaagcttttgtccctgctgttaatgcgggcagcacctacagcaacttggaatgagtaagaagcagtgcgttaactatctatttaataaaatgcgctcattatgcaagtcgcctactctctgctacctggacgttcattcttatgtattaggagggaggctgcgctccttcagacttgctgcagaatcattttgtatcatgtatggtctgtgtctccccagtcccctcagaaccatgcccatggatggtgactgctggctctgtcacctcatcaaactggatgtgacccatgccgcctcgttggattgtcggaatgtagacagaaatgtactgttcttttttttttttttaaacaatgtaattgctacttgataaggaccgaacattattctagtttcatgtttaatttgaattaaatatattctgtggtttatatgaaaacttc

SEQ ID NO: 219 - DNA, 523 bp, Homo sapiens
gtctcgctctgttgcccaggctggagtgcagtggtgcaatgttggctcactgcaacctctgcctcctgggttcaaatgattctcctgcctcagccgccggagtagctgggattacaggcatggaccaccatgcctggctaatttttgtattttcagtagagatggggttttcaccatgtttgccaggctggtcgcgatgtcctgacctcaagtgatccacctgccttggcctcccaaagtgctgggattacaggcgtgagctactgccccggcctgttttttgttgttttttttttttcagacagggtcttgctctgtcacccacgctggagggcagtggtgtgatcatggctcactacagccttttaatctcccaggctcaagcgatcttcccacctcagcctcccaactgggactatagtagtgcatccccatgcccagctaatttttttaaatttttgtagagacgaggtctcactgtgttgcccaggctggtcttcaatcctggtctcaagcagtcctc

SEQ ID NO: 220 - DNA, 484 bp, Homo sapiens
aaattgtggagtgtgtgtgtgtgtgtgtgcatgagtgtgtgtgtgttgccactcaaccagatagaattgtggctgggacatcttgggggagagggtctaattgtagctgtaggagtttgaagaaacagagagcaaggtcgcaacagtgaaaaaggccgccaggtgccccaaagacctcctagcctggccatcctcagtgcaggttctggtcaaggctgcacccttggtcctcccagtgctggcatccctttctttccatctagagatactcagactcccgggggcagctcacaggagttcagccccaccgggttggtgcattcgtcagcagttgtgaattgccatagagagccctttttccaatggctggtgctttcatgccctatccaaggcgtgaaaattatcccgtctctcccaggattgaaatactagggaagagccgatggggaattggagcaaagcgagactgaggctctggacagct

SEQ ID NO: 221 - DNA, 285 bp, Homo sapiens
gggctgagaagagacacgggctggtagccccttctgtttttgggggccaagataatggggaaaggattgcatttgcagtgattttcttatacgtcgtcttcaagtcacagctacttctttgcctgaggatgtaagaatggaggattggaaagatggttgctctagatgactcttcatgcatccatccaaccatccaagtgtgcagctacaaaatttcttgaacatctgctatttgccggtcactgttttaggtactgaggatacactgtgaacaagacagacaca

SEQ ID NO: 222 - DNA, 484 bp, Homo sapiens; identical to SEQ ID NO: 220

SEQ ID NO: 223 - DNA, 439 bp, Homo sapiens
gagaaactgacagtgagaccaccctctaggatgaagcagcttctcccagatgggagatggagagcctggcttagtcttcactgggagggtcttaacttctctgtgcctgtttccttctttatcaaacagagggagtccgtctgcctatagaaaactggagatctattgatgaaaagtattgcttagatgcaaagctctcccctttgtagtaattaaaatacctaaagctaaatattatattttattttaaaatgcagttcagcatagaaattctaacatttctttggaaataaaaaaatgcttgtttccccaaacccatagtaagataaaggggcaatagtcaattcatatttaaaacaaataatttaaaattgtttaaaggttagatttaaatatagatgttctcaaacaaacttgtaatatacttttatgtcactag

SEQ ID NO: 224 - DNA, 13117 bp, Homo sapiens
gccaggcgcggtggctcacgcctgtagtcccagcactttgggaggctgaggcgggcagatcacaaggtcaggagatggagaccatcctggctaacatggtgaaaccctgtctctactaaaaatacaaaaaattagccgggcatggtggtgggcgcctgtagtcccagctactcgggaggctgaggcaggagaatggcgtgaacctgggaggcggagcttgcagtgagccgagatcacgccactgcactccagcctgggcaacagagcaagactccatctcaaaaaaagaaaaaaaaagaaaacagaaaaactaggcatggcttaagtgtaatatcactgaaagccaggataaatgaacgctaaggatcgaaaccctggggtactctgtagaatgaattaacagcagggttaattagcaaaggtcagaaagggtatggaggaaagccaacatcagagatcaacatcaaagctaacatcagagatcaactggagatgggaactgttaagaataggttcaaggccagttgccaggagcccccatgccaacaatgtgattgttcttcatgagaagccacccgtgaaaaaggtgagactccctgatgatgacatagtgggggcaaacacagaaaagatgaatttagaggcaagaaaggctttacttcattgttacttgggaagatgccaggggcagtcccactcctaccttgtgccctagaatggacagggatcaaacagtaattacagcacaggctatcccaagtctagaagatcaatctccaggcacagagggcactcatccaagagatttttggggaaacggggcaggggatcttctgaattataaggcaaagctgctatcccaatgccagggtgaaacgacacacttttccccagttcaaccctccctaagcagcagtcccaaagatgctctagcccaaagtgtcacctgtcccagttaatctccaccttccttctcatcccacttccccagtcaggctcctatatatgtgatgccattgatctttatacattagtatacaccggtattatgagaaaagcagtctatcttattttcatttataaaataatctacatgaaattgactgactactcccaatttcaggcagtagagagaaaatttggaccaggttaggggtttccaaaaccctgttaaattacacaaggccctaagacagggtcagaaatgaagaaactttggtaactggagatggtatctcccaacctcattggtgttttactgaatttatgaaaacagatggaggcaaagatcactaaatagcaagattctgtttcagtgaaaggctctgcaacatgatctggtttaacaaagactaagcatcaatgatctaccaggtgcgatgcttaatccctgaggatgtggaaagaaaggcatgcaaacaaagacagagcaccctgtgcaagaatatcggagtacacagggagggagtagcctcgttttgagaatctaagaaagggaaactggaatctgccagacatagagcggggcagagaaaagaaaaggcatttcaggcagtggacacaggcccgaagtaccatttgaaaacacacacaaacacacacacacacacacacacacacacacacacacacacacacctccaaagagcaaagaacactgcaatggatggggcaaactaagcaggcaggactacaaacacagaagactgtgtttgtgtttgtgagaagacaagacactcctgtcttctcacactaaggagcttagattctttgaacccaatgaggaatcaccaaatttgtgatttcaaaagttcaccttggcagcaatgtgaagataggtttacagggtgagaccagatgcgtgactatggctgaaggccaagccaataggaaactgctcattctggcatgtgctgagagttcagaagcaaagatggaagtatttgcattagagccctgctctaggggatgggttcaaaacaccaagaactacgtaatccttctttcctacttctcgttcagcatcaccttgcacttcaaaatatcctgtccagcttcacctgctttcagctactcacggaacccagtgttcatggtgccacaggtgaagatagagatggagtcagactatgacttcacagacatggataaataccgaagagaaactgacagtgagaccaccctctaggatgaagcagcttctcccagatgggagatggagagcctggcttagtcttcactgggagggtcttaacttctctgtgcctgtttccttctttatcaaacagagggagtccgtctgcctatagaaaactggagatctattgatgaaaagtattgcttagatgcaaagctctcccctttgtagtaattaaaatacctaaagctaaatattatattttattttaaaatgcagttcagcatagaaattctaacatttctttggaaataaaaaaatgcttgtttccccaaaccatagctaagataaaggggcaatagtcaattcatatttaaaacaaatatcaatttaaaattgtttaaaggttagatttaaatatagatgttctcaaacaaacttgtaatatacttttatgtcactagaccatctttggaatatttggcaattctgcatattaagaaatgctgaaaaggtcctatcttttctccctgtcacatccaatttcctaagggttatatgaaaagtttgaaccagccgggcacagtggcacacgcctgtaatcctagcactttgggaggccgaggcaggtgaattgcctgagctcaggagttcgagaccagcctaggcaacacggtgaaaccccgtctctactaaactacaaaaaattagccgggtgtggtggcatgcacctgtagtcccagctattcgggaggctgaggcaggagaatcgcttgaacccaggaggcagaagttgcagtgagctgagatggcaccactgcactccagcctaggcaacagagtgagactccgtatccaaacaaaaaaaaagtttgaaccatctgcattatgggccttgctccagaagtgtgactggggctttcccagattgaaaagccagttccaaaactctgttaatgaaagaaccaatgcatctgagtggataaatgtttctaaaataaaatagttcttgttaaagtgaaatttgaaaccacatgttaaatcaaaatgatcctttaaattagtatcactggtttttcatacctggaatcacatttcatgatacatttgggtgggtcctccctgcaaattttcaatgtttattcccaaagtcaaactcccattcatgtgaacaatacaggttagacagaggtaaggtcacattttacattacaactttgcaatattaatcaacctagtactttaaaggaatgattgaaaactatttgggaagataaaaaccagtttcaatgaagcaaacctattcctcatgaaacttaagatcagtcattttatcttcaatccacatttaatgaacaccaaccatgttgatttaatgcctactatgaccctgacagccacagtgcatctgacacttactttctccaaaacaactatgatttaaaccttgagtaaatcacttgaaccttgaggttagagttactatatttgctcaagatgacaaatgcaggtgctttcttttttaaagaaaaatgacactagatcattaacaccttgagtataggacaggtaattgcctctgtaattcccagcgtctagtgtagtgcctggtccatagaaagctctcaataagtgtttgattacatttaatctcagagctcccttccaagggatactgccaagaggtaaagctccaaacctctactcttactgagagcagaatttcttagaatttccagaaccatctcctatgcttaagtataaattcttgtcagacacagtggctcacacctgtaatcccgctacttgggaggcagaggtggggggaatcagcagaggtcaggaggtcaagaccagcctgggcaacatagtgagacccatctctaaacaaatgtttaaaaattagctaggcatgctggcacacacctgtagtcccagccatttcagaggctgatgcaggaggatcgtttaagtccaggagttcaaggctgcagtgagctataatcatgccactgcactccagccagggagacagctggaatccatgtcttataaacaataataattaatttttaaaaaaagtatttatcatccacaccaatcctggggaagctaacaatccacccttaacacatttcagttttaaaacctggctgatctggaatagaactttgtccaaattaaattgtagaaatgctatggattcaagagtaaacctgcttgattaatcaaacaagctggaaaactactgttaatttctttgttgtaaattgatcactgtaattttaccttacatgtcatttatattttgtatatacatgaacattttaatttccatagcttttaacaggttgacataatacttctccatgcagtaagtcagtcattttttccacttgtaactgtaattcaataaaatttaatcctgtctggtcatcttgctccacatttaataatctaggtaagcaggcatggattagagacataagctatacgtcacttacaaaaacatctccagcaaactatctaaacttctttaaactccagagaactatcaaaagaataacgccagctggcagaagaacgaggacggaggtaggtcaactcaattgtttcttctctttctgcctcaagctgcctagagcaggagctacttctgctcgcatgaaagccaaaagccaaaacagacaaacctatccctgcctcaagtattttacagattaagctcctagcttggcacaacctgttgtgatataagactgtaggacaggccaggtgcagtggctcacgcctgtaatcctagcattttgggaggccgaggcaggtggatcacttgaggtcaggagtttgagaccagcctggccaatgtgatgaaaccccatctctactaaaaacacaaaaattagccaggcatggtggcatgcacctgtaatcccagctactcaggaggctgaggcacaagaattgtttgaacccgagaggcagaggttgcagtgacccgagatcatgccactgcactccagcctgggcaacagagcaagactcagtctcaaaacaaacaaacaaagagactggaggacgaggctggtttctccaaagctctttaaacctctgtttgggtgtgggtgcccaggcctgtaatcccagccctctgggaagctgaggcaagaggattgattgcttgaggccaggagttcaataccagcccaggcaacatagcaagaccccatctctacaaaaaaaaaaaaaaaaatagaagaaaaaaaattatctatttaaggctatagaagtaagtgttactgaatataggaatagctacattgattaaatgagaaaaaaactggttaggtcacaactaggagtcataggaagacagaatttcagaaattcataccataccagacagatgtgttttattaaaaaagaaagaaaaccctttaatcagaaagtctgattaaattcaatagtaactcaaactcttaaaaaatttctggaaaagtcaacaggatacatacatcacagaaaagcaggcagctgctgacagttctttggtggaaaagtaagttgcgtacttacccaagctgcccaaatgattatcaagccaagtttgtttttcaaaaataggttttaagatacaccaaagaaactatacaatacaaaaatttaacaatgaagttaaagtatatagcaaaagccaaatatgacaacacacatgtataatgtagaaaagaatcctttcagtcctagaaaactaaaatggggagaacttactgaagggtaacatacataaaatgagtactaatagcaaggaataatcctaaacattttcccaataaactgactaagcctcaaaaggacagcttaggaaaatgattaacatgcagtttttcttttttcctagccaattcagttctacttagataaatctggttgccaatcaatacatatataaattaatttttttctgctcaattactaccattttttctttttcaccttttccctaattttctctagcaacacttttcctttggtttgatcagttgaactcaaaaggtttggtacctaaaatgagtatcaactgttattgcaatagcacttgggaaatgcaatcctagaaaaggcgaatgtgtaactgaggtgcttgacaaagtgaagcatccatcctccatatggtaatgtctcccatattaatcactaggttaatggctgctcctggctagatcacaggaccctgcatgatactggaatgctccctggtgaggtactgcagaggtatgtgcagaaacacccacccatttaagctttcaataaatacaaggcatcattttaaaccatttcagtagaataaattaaaaatattgcatttctattggcctgctttgcttcttgagctggcctggagtgctgtttgtgacacagaagacacagtagttaattagtggctaccccaagctctttagacttcagcacttctcgctcttcaagcctcagcaccttttttgcagcaataatggtattcttcattagcattgccactgtcatggggccaacacctccaggaactggagtgatatacccagctttttgtctgactcctacatagaaacaagacaggcaggctgctttagttatggcaaaggacatgtgtgtactttaatatattattaaacaagcatgcaaggaaaaagtaacatacataagcataaaactcaaaaatcacatctacatcattcaaggttttgtgaacacactagtaaaataacatgcacatacagagttgttcaaggaatatttatacatctaagtaacctataaagaaatctattaaagaaatatctagtaggttaactgtgtgggagttgtaagtataacaataataagcattacctcaatacctgcctatagcattttcttaatttaattttaagtataatttgtccaaagcagaaagcacagtaattttttaaaagtgagaagttaaaaaaaaaattaacctaatgttaaagtgaaaatccttacatacctaggcatgggtttgactgctttaataaaaacagaaagctaggaataggattatcagcataggccgggtacagtggttcatgccagtaatcccagcactctggggggctgaggcagggtgtgaggtgggggagattgtttgaggccaggagtttgaaaccagcctgggcaacatggtgaaaccccatctctacaaaaaatacaaaaattagccaagtgaggtgacatgtgcctatagtcccagctactcaggaagctgaggcaggagaattgctcaagcccaggaggcagaggttgcagtaagctgagatcctgccactgtactccagcctgggcaacagagagggatcctgtctcaaaaaaaaaaaaaaaaaaaaaaaaggaaagaaaaaaaggattatcagcataaaactcggataaacattctatcttaagaactgaaaggagaggccaggtgcagtggctcacacctgtaatcctagcactgttaaaggctgaggcaggcggatcacttgaggccaggagttcaagaccaacctggccaacacagccaaattcatctctactgaaaatacaaaaaattagccggcatggtggctcatgtctgtaatcccagctacttgggtggctaaggcagaagaatcacttgaacctgggaggtggaggttgcagtgagcagagatcacaccactgcactacagcctgggcaacagagtgagactctgcctcttaaaaaaaaaaacagaactgaaagaagaaatctactagtatattctagtatttcaggggtatggttttttcctggaccattttaactttctaggcctgtgatctctcagtgtgaaaatgagaaatctctaacactttttgggaaactccatggtttagaaaaatcacttcatcaaattttcaaacttgttaaaagtcaagaaattgcttgaattatgaaataagtctaaggaaaaaaacaattccctgaaaagtttataactgctctccatcactatgataaaacacctaaaataattctagaaaagccataattttaaaaaggtttctctaattcttatgaaaagcctactaaggccaggtgcagtggctcatacctgtaatcccggcactttgggaggccaagacgggtggatcacttgaggccaggagttccagaccagcctggccaacatggtgaaaccccgtctctactaaaaatacacaaaattagttgggcgtggtggcccatgcctgtagtcctggctactggggaggcttgaagcacaagaatcgcttgaagctgtgaggtggaggctgcagtgagccgagatggtgccactgcactccagcctgggtgacagagtgagactgtctcaaaaaaaaaaaaaaaaaaaaaagagaaagaaacgaaggaagaaaggggtggggggagaggaggggaggggaggggaaggaaggaagggagagagatggagggaaggaaggaaagaaagaaggaagggaaggagagagggagggaaaagcatactgactgggcgcagtggctcacacctataatcccaacactttgggagtcccagctactcgggaggctgaggcagaagaatagcttgaacccaggaggcagaggttgcagtgagccgagatcgcgccactgcactccagcctgggcaacagagtgagactcccatctcaaaaaaaaaaaaaaaaaaaaaagtaaataatctatcctaaatgtccatgaaaggtagtatttattgatttcatttttaaaaataaaatttcaccatttaccttcaaaatccacatctccaaccaacttgggtttggcagttacaggatcgtgaactctatttattcccacatcaatgactgctgctccttccttgatcatatctgctgtgatcagatttggaatacctggaaatggagaaaggaaagatcaacttagtactgaaaacagtctacctgtcagattcttgtctaacttcaatttcaagagaccctgaagaactaatcaacatgttttattaaaacctgttaaaaatattaactaaggaactatttacttttattatttttttattttggctcctgacaggaaacaaaaggaaccatttaaactttatacagtaaatattaatataaatattttgaagctttaggaataacattcacccatctagactataatggactgccagaaaccggtattccaatcacaactctatcctcatctttgtaggcagctcaaagaatcattacaaggggaatgatgaatagcagctaggcaggcgaattctaagatgaggggtacaacctcctcttctgaggtgaagtccttccctccatcccccttgtgttcttacctgcagcagatattacaatatctgcaagaattgtatgtttcttcaactgctctttgggagtatatcgatgagatattgtaacagtggcatcacctagaaagaaaaaaatagatgtcttgatttctgacacaaagctgggattggattaggtctcaactagtcaagtcattgtagaaactcaacatctctgaaaaataattgacttacggccaggtgcagtggctcacgcctgtaatcccagcactttgggaggccgaggtgggcagatcaccaggtcaggagttcgaggccaacctggccaacatggtgaaaccccgtctctactaaaaatacaaaaattagctgggcgtggtggcgcatgcctgtaatcccagctacttgggaggctgaggcatgagaatcacttgaacctggaaggtggaggttgcagtgagccaagattgtgccactgcactagcctgggcaacagggcaagactccatctccaggaaaaaaaaaaaaaaaaactgacttaatggcttgtgccatgttttctgaacagctaattgtcatttacttttttaaaattaatacctaatatcatatagctttaacccattggtcccagctcgactgttttgagtcatataattaaatttattcatcctatttttaaagcctttcaagaattttaccttttctaagcaaaatatcactaaaattactcaaggttgttttaagtatgttgaaagatagttgaaagtatatagttttgcctttatttctgatataatcatgtaaggtcattattacaataattatgtgataactgattgacgaggctttaccttagaaccaattaacagaacctgacaggacacattacagtcataccaatccaatcctttgcaacggctaaagatttttttccactaaatgacacagtatctttgaataagaattgctccttagctccagctatcaaagctatagctgaaattttctaattgcctacaaccatgcttatactcaaaacttaaatttatttctgaagctagttacatgataaatgaataataaagaaactcaggtgacactgggtgcagcttctctacaaaggttactccctgaattgtctgttaacaaaatttcaacaaatacaaagtataacagagttaatacttccaaacatgcacaggatggcttctgaaagttcttacatggggaaaaaaggacagtgttccctgaaagcaatttccttacctccgggacgttcatgcgccccatctgtgtgcagtaacattgcaatgggcattccaacgttttttgaccttccagccacaaccacattcttccctagggttggaatgcctataaaaatatatgtattgacattaaaagtagtgccagtccaaaggaaaacaaagtcagatggcctagaacatgaacccaattttgcctcatcagtcaactggagctgtaacttgctacacataataagggctaaaagaaaacaggagaaagcatactacaggctacaaaatgttacaggaatgtgcactgtcaccactatcaaatcttaaatttccttcactgagggctggggcggtggctcacacctgtaatcccagcaggagggaggattgcttgaggccagggaggctaaggtaggagaattgcttgaggccaggagtttgagaccagcctgggcagcatgatgaaacctctgactcttaaagaaaaaattaaaaagaaaaatagaggccacgcgcgatggctcacacctgtaatcccagcactttgggaggccaaggcaggtggatcacaaggtcaggagatcaagaccatcctggctaacacggtgaaaccccgtctgtactaaaaatacgagaaaaaaaaaaagttagccaggcatggtggtgggcacctgtagtcccagctactcaggaggctgaggcaggagaatggcatgaactcaggaggtggagcttgcagtgagtcgagatcacgccactgcactccagcctgggcaacagagcaagactccgtctcaaaaacaaaaaaaaagaaaaagaaaaatagaaaatttccttcactgagacttctggattaaaaagcaaaaactgtcataggcaactgttaagggcaggcacgatggctcatgcctataatcccagcactctgggaggctgagggggcggatcacctgaggcctagttcgagaccagcttggtcaatatggtgaaacctgtctctactagaaataaaaaaattagctgggcatggtggcacgtgcctgtaatcccagctactcaggaggctgaggcatgagaatcgcttgaactcaggaggcagaggctgcagtgagccaagatcgcgccactgcactccagcctgggtgacagagcaagaccctgtctcaaaaaaaacaaaaaacaaaaaaaaaactgttaagagaggtaaactttggggagtaagactagaggatatgcagtagggtttccactctttgggactgtatgagtttttaccatttgccagtactacttttataatattaacacagacatgcaattctgggatatacctaccagttcgcttgattatttcccacacaccccatggagtagccggtaacatggaatactgatccaaacacattcgtcctacattaattacatgaaagccatcaacatccttgtctggagaaacagcattgcagatccttctctcatcaatatgctctgaaaaagaaattggcacagttgccttaaatcaccaccgcatagtcagcactgcctgactccagcttatctgcttcgcaaggaaatctattcttctacagcttgcctctgagatgtacttcatctgcatggaaggaactcgcataagcaaagccaaacaccaatagcaaagccaatatcgtctatcacagctgcttccctccactgtcctttgtatcaagaccacaatactaaatcaaggcgtaattggtattctgagttggtctgtcccatttctaataaaatattcactcttttgagtttattttgcctttaagccaaatccacatgaagaaccaggtgtataaagtaacaaggcctttttacccctcagaaaccattttaggtagggcatggtagttcatgcctgtaatcccagcactttgggaagcacagagtccaagaccagcccaggcaacacagacagactttcatttctaggaaaaatgtaaaaattagctgggcatggtggacatgcctatagtcctagctatttgggaggctaaggcaggaggatcccttgaacccaggagcttgagcatgcaatgagctatgattgtaccattgcactctagcctgggtgacagagtgagacaaggaaaggagagggaggaggagggggatggggagggagagagagagggagggagagggaaaggagcagaagcagcagcaatcatgttaaatggagtccaaaactcacctggaagaggcaactgaacaaggaggccatctacattatcatcattattcagtttattgattaaattcaacaattcttcctctgaaattgaagctggtttcataattgtctcactgttgattcctattat

SEQ ID NO: 225 - DNA, 4039 bp, Homo sapiens
ttgaaccagccgggcacagtggcacacgcctgtaatcctagcactttgggaggccgaggcaggtgaattgcctgagctcaggagttcgagaccagcctaggcaacacggtgaaaccccgtctctactaaactacaaaaaattagccgggtgtggtggcatgcacctgtagtcccagctattcgggaggctgaggcaggagaatcgcttgaacccaggaggcagaagttgcagtgagctgagatggcaccactgcactccagcctaggcaacagagtgagactccgtatccaaacaaaaaaaaagtttgaaccatctgcattatgggccttgctccagaagtgtgactggggctttcccagattgaaaagccagttccaaaactctgttaatgaaagaaccaatgcatctgagtggataaatgtttctaaaataaaatagttcttgttaaagtgaaatttgaaaccacatgttaaatcaaaatgatcctttaaattagtatcactggtttttcatacctggaatcacatttcatgatacatttgggtgggtcctccctgcaaattttcaatgtttattcccaaagtcaaactcccattcatgtgaacaatacaggttagacagaggtaaggtcacattttacattacaactttgcaatattaatcaacctagtactttaaaggaatgattgaaaactatttgggaagataaaaaccagtttcaatgaagcaaacctattcctcatgaaacttaagatcagtcattttatcttcaatccacatttaatgaacaccaaccatgttgattaaatgcctactatgaccctgacagccacagtgcatctgacacttactttctccaaaacaactatgatttaaaccttgagtaaatcacttgaaccttgaggttagagttactatatttgctcaagatgacaaatgcaggtgctttcttttttaaagaaaaatgacactagatcattaacaccttgagtataggacaggtaattgcctctgtaattcccagcgtctagtgtagtgcctggtccatagaaagctctcaataagtgtttgattacatttaatctcagagctcccttccaagggatactgccaagaggtaaagctccaaacctctactcttactgagagcagaatttcttagaatttccagaaccatctcctatgcttaagtataaattcttgtcagacacagtggctcacacctgtaatcccgctacttgggaggcagaggtggggggaatcagcagaggtcaggaggtcaagaccagcctgggcaacatagtgagacccatctctaaacaaatgtttaaaaattagctaggcatgctggcacacacctgtagtcccagccatttcagaggctgatgcaggaggatcgtttaagtccaggagttcaaggctgcagtgagctataatcatgccactgcactccagccagggagacagctggaatccatgtcttataaacaataataattaatttttaaaaaaagtatttatcatccacaccaatcctggggaagctaacaatccacccttaacacatttcagttttaaaacctggctgatctggaatagaactttgtccaaattaaattgtagaaatgctatggattcaagagtaaacctgcttgattaatcaaacaagctggaaaactactgttaatttctttgttgtaaattgatcactgtaattttaccttacatgtcatttatattttgtatatacatgaacattttaatttccatagcttttaacaggttgacataatacttctccatgcagtaagtcagtcattttttccacttgtaactgtaattcaataaaatttaatcctgtctggtcatcttgctccacatttaataatctaggtaagcaggcatggattagagacataagctatacgtcacttacaaaaacatctccagcaaactatctaaacttctttaaactccagagaactatcaaaagaataacgccagctggcagaagaacgaggacggaggtaggtcaactcaattgtttcttctctttctgcctcaagctgcctagagcaggagctacttctgctcgcatgaaagccaaaagccaaaacagacaaacctatccctgcctcaagtattttacagattaagctcctagcttggcacaacctgttgtgatataagactgtaggacaggccaggtgcagtggctcacgcctgtaatcctagcattttgggaggccgaggcaggtggatcacttgaggtcaggagtttgagaccagcctggccaatgtgatgaaaccccatctctactaaaaacacaaaaattagccaggcatggtggcatgcacctgtaatcccagctactcaggaggctgaggcacaagaattgtttgaacccgagaggcagaggttgcagtgacccgagatcatgccactgcactccagcctgggcaacagagcaagactcagtctcaaaacaaacaaacaaagagactggaggacgaggctggtttctccaaagctctttaaacctctgtttgggtgtgggtggcccaggcctgtaatcccagccctctgggaagctgaggcaagaggattgattgcttgaggccaggagttcaataccagcccaggcaacatagcaagaccccatctctacaaaaaaaaaaaaaaaaatagaagaaaaaaaattatctatttaaggctatagaagtaagtgttactgaatataggaatagctacattgattaaatgagaaaaaaactggttaggtcacaactaggagtcataggaagccagaatttcagaaattcataccacaccagacagatgtgttttattaaaaaagaaagaaaaccctttaatcagaaagtctgattaaattcaatagtaactcaaactcttaaaaaatttctggaaaagtcaacaggatacatacatcacagaaaagcaggcagctgctgacagttctttggtggaaaagtaagttgcgtacttacccaagctgcccaaatgattatcaagccaagtttgtttttcaaaaataggttttaagatacaccaaagaaactatacaatacaaaaatttaacaatgaagttaaagtatatagcaaaagccaaatatgacaacacacatgtataatgtagaaaagaatcctttcagtcctagaaaactaaaatggggagaacttactgaagggtaacatacataaaatgagtactaatagcaaggaataatcctaaacattttcccaataaactgactaagcctcaaaaggacagcttaggaaaatgattaacatgcagtttttcttttttcctagccaattcagttctacttagataaatctggttgccaatcaatacatatataaattaatttttttctgctcaattactaccattttttctttttcaccttttccccaattttctctagcaacacttttcctttggtttgatcagttgaactcaaaaggtttggtacctaaaatgagtatcaactgttattgcaatagcacttgggaaatgcaatcctagaaaaggcgaatgtgtaactgaggtgcttgacaaagtgaagcatccatcctccatatggtaatgtctcccatattaatcactaggttaatggctgctcctggctagatcacaggaccctgcatgatactggaatgctccctggtgaggtactgcagaggtatgtgcagaaacacccacccatttaagctttcaataaatacaaggcatcattttaaaccatttcagtagaataaattaaaaatattgcatttctattggcctgctttgcttcttgagctggcctggagtgctgtttgtgacacagaagacacagtagttaattagtggctaccccaagctctttagacttcagcacttctcgctcttcaagcctcagcaccttttttgcagcaataatggtattcttcattagcattgccactgtcatggggccaacacctccaggaactggagtgatatacccagctttttgtctgactcctacata

SEQ ID NO: 226 - DNA, 293 bp, Homo sapiens
gcacggtgcctcacacctgtaatcccagcactttcggaggccaaggcgggtggatcacgaggtcaggagatcgagaccatcctggctaacatggtgaaaccccgtctctactaaaaaaatacaaaaaaattagctgggcatggtggtgggggcctgtagtcccagctactagggaggctgaggcaggggaatggcatgaacccaggaggcagagcttgcagtaagccgagatcgcgccactgcactccagcctgggcaacagagtgagactccatctcaaaaaaaaaaaaaaa

SEQ ID NO: 227 - DNA, 26995 bp, Homo sapiens
aaaaagagttaccttctcatgttcaggcgatgcataaaagaaaggaatttctagattatcagctggatgagctttcccggcagcgagctctatgccgaggtggacgggaaatacaggtatctttgcatttcttgaataataactcaggtatacgaactagttaacaagttttttttgagacagagtcttgctctgtcttccaggctggagtgcagtagcacaatcctgactcactgcagcctcaccttcctgggttcaggtgatcctcctgcctcagcctcccgagtaggtgggattacaaggttgtgccggcacacctggctaattttctgtatttttaatggagatggggtttcaccatgttggccaggctagtctcgaactcccggcctcaagttgatctgcccacctcagcatcccaaagtgctgggattacaggcatgagccattgcgaccagcctaattaatgagtatttaatgccctttatttattggggaatggcatgattcatgtataaaaatgtgtactaagacactaaaaatgtgtctcagattaacacatttctttctgctttttttttttttgtccttttggttttaattttttttttcattttttcttttattaaaattacttttgttaaaaatctttttaaaaacttttttgtaaagggcaagatattctagtaaagattttaggctttgcaagccatatggttggtttctgttgcagctattcaactctgcttttggtagcacaaaggcagccatagataatacataaacaaatggatgtggctgtgttccagtagaactttatttacgaaaatagatggggtgttgcgtttttgtttgtttttgagatagggtctcactttgtggcccaggctggagtgcagtggtgcagttgtggttcaatttagcctcaagctcttggactcaagtgagctgtctttctgcctcagcctcttgagtagctgggactacagccgtgtgccatcatgcctggctaatttttttgtttgttttctgtagaaactgggtcttgccatgttgcccagggtggtctgaacttcttgcctcaagcagtcctctcaccttagcctcccaaagtgccaggattacaggcatgagtccctgcacatggccttgcatttggcttataggctgtactgccttatattaaagctatactgagtttattagttgcctttcagttgcatgttgagcccagttcaaattaggttagacagaaagggaattagcttcagtatgggtggatccagagggtcacatgatatcatttctccactccataatttgtttttctgtgtgtcagccatttcttctgagaaaggtgagtgtcagcatctcagggcttccaccatctcagctttgaaaccccagagggagagaaagtctttctcttagcatccatatatccaaagaagcagttagtttagtccctgggtgagcaagcaggtctaatccctatttttaagaagatgggtgcatgattggccaggcctgtgttagatgcccatcactgtggccagaggaatggttggggtgtgatttacagcctcatttgaatcacctggaagttaagggtggcgtgatgctcccagtgctggaatgctaagcagacagctcacgtgcagcgcacagaacacagctgagtcttacgcagcagcatacagagtgtgtcaggactccagtggtaaagaggaaataagctgggtaaatacatttttcattggtgaaatacaggctcttttaaaattagaggtagtccattggaaggcatttaaaaatgcttagtttagttttaattgtgacatttgaatttttttccagaggcaagaattagatgaaaacatttccaaagtttctaaggaaaggcaggaacttgcttctaaaattaaagaggtaagtagttcacctgtagcattttcttgatttttttttttttctttttaaaatttaagtatgactgttcagacaagctatgggcttttatttatttattttggagacagagtctcactctgtctctcaggctggggtgcagtggcatgatctcagctcactgcaacctcagtctcccatgtggctgggattacaggcgtgcaccaccatgcctggctaatttttttttttttttttttttgaggtgaagtcttgctctgtcaccagactggagtatagtggcgtgatcttggctcactgcaacctctgcctcccgggttcaagcgattctcctgcctcagcctcccgagtagctaggattacaggcgtgtgccaccacgcccagctaatttttgcattgttagtagagacggggtttcaccgtgttggccaggatggtctggatctcttgacgtcatgatcctcctgcctcagcctccctcaaagtgctgggattacaggcgtgaggcaccacacctggcctcttttgtgtttttttttttttgagacagagtctcactctgttgccaggctggagtgcagtggcacaatctcagctcactgcaacctctgcctcccaggttcaagtgattctcctgcctcagcctcccgagtagctgggactacaggtgtgcgccaccacgcccgactaaattttgtatttttagtagagatggggtttcaccatgttggccaggatggtctccatctcatgacgttgtgatccgcccacctcggcctccctaagtgctgggattacaggcgtgagccaccatgcctggccctttttttgtatttttaatagagatggggtttcaccatgttggccatgctggtctggaacgtccaacctcaagtcatcccccgtctcggcctcccaaagtgttggcattacaggcgtgagccaccatgcctggccagctatgggcttttctcagttacattttaaattgttatgaaaaattacaaacatctgtggaagtggagaaaatggtgtaacaacatttgcatttttttctttaacctaagaatgaattcttaccaccatctaagatttctaagaggtggttataagttatcttttttgttttaagtctggtaaatatttaaattctttcttataaggtgctctatttctgcttcccataaactgcaaaaaacaattatgataattatcatcagataaacagttaatgaaaatagctttggccaggcgcggtggctcacgcctgtactcccagcactttgggaggccgaggcgggcggatcacgaggtcaggagattgagaccatcctggctaacacagtgaaaccccgtctctaataaaatacaaaaaattagctgggcgtggtggtgggcacctgtaatcccacctactcgggagcctgaggcaggagaatggcgtgaacctgggaggcagagcttgcagtgagtggagatcgcgccactgcactccagcctgggtgacagagcgagactccgtctcaaaaaaaaaaaacaacaaaaaaaatagctttgtgggtgttttcactattaaaaaaaaaaagtcacctgtatgagctttaggatgagggtggcaactgtgagccctccagagctccaacctggatagaagtagagtgatggtgggcagaattcggcaaaagaaagtacagcactttgatatttggtttttgttttttgcaattcttgggttagagcataaactccctgtacttgtgttggatcataagactcctgtaacattttgtagcttttctccagtattttttggatgtgaaaatatcctgtaagatttagactcattgaagcttggccgagccaggtgtataccctgattgtcagaatgcagccctaatcaaaccacactggggtcagggaaagagggtaatagtaactgatgacgttagtagttttttgctgaagtttcctcctgaatggattatgatctttctctatgtgactaaaatatagttgaatttaatgcatattttcattagcagtttatttaaactaaaagttatgtgaaagcttttgattaaacagattttaatcagattttaaacagaaccccagattaatctttcctgagtcaaggatgaagtccatcttcacagatgttttttgctgctcatcacatgtgttctgtgggccatgaaactatgctcagcagttgtactcactaggtggctgaggacagtgtctgacagtgctttactgtgtgagccgtggaggaccacagtgccaccctcttcctaaagctcacacgaatgccttgaattccatggttgaatatatcgtatgtgctgagatgaatcaccactacttcttagtagcaaaaagcagcaaactgaatctctgctggaaatgctgattgactgagcagtgtaggtgtgactgtgaggcgtcactcacgtccggctccatcacagcacactgcgttagagagggagaccagactgttccttactgtggaaatagaggatttgtcaggttcacaggcatttttgttagtactagcaaaagcactaaaaaaagacagggcaatattatatacttaaaaactaacagaaaaatgtacattcaggctgaattccacccctggttttactcatataattcacaactcagaattattacatctctacttcagatacctacctacatatatctgactacaggaaggattgtaatctactttgaccaaatcaaaccctggataaaaatttttaatgtgcttaaatcatattctgtgtttcagccgcgaagcacacattctttctgctttgtgattatcttaaatgtttctgctgtttcctagatttgagggtttcccctaacttttactaaatatttttctgtcataaatctattttaataaatagtgagtgttttatagtaaacataggcctgtcatagtcaaggattgatgtacagctgaatattgatttaacctttgttctcttaggttcaaggacgcccacagaaaacacagagtatcatcatcttagagtcccatatcatctgctgcacgttgagcacaagtggtggtttactacttgagtctgctttccgtgggcaagggggtgtccccttcagctgtgtcattgttgatgaggtcagtgaacggtcagccatacaactttgactactactatgaggagtaagtcttagatgaattgtggctgctgaaatgttgaggaaatgtgttttttttttttgcatctgattttcacttgctattacctgtgtattcccttatgtagaaatatactccttaatgaccctccatagtgaaagtggattttccagtattgggggttagtcttgaggatgactgatggtttctaacaaaatctctgctgagtgactgtctcactcctgcttagaatatctctggtaaccttttgaagtagttttaatataattttggatagctttgagccacagtatgttcacctgatgtcttttattcctagttcactctttgagcaaacatttattgggtacgtactgtttgtcagaacgtagagtcagaagacaaaagagatggagcaggagataccagagaattgagtgatcaggagacccaagatccagttttcaccagaaggaaaggacaaaaagtggaaatgattaaatagttgaagaaaatgtcattgaatttaagagaaatttgagtcttgtcatcaaagaggcatgctgaggaacaaggaagaaagatatggggaaacacactcatggacgctcctaatgtgatttctgaacctcaaatacaaagttttgaaaagggcctgggcatggtggtgcacacctgtaatcctggcactttgggagactgaggagggtggatcgcttgagcccaggagtttgagaccaacctgggcaacatggtgaaaccttgtctctactaaaaagacaaaaatgagccaggagttgatggtgtgtgcctgtcattccagttattcgggaggctgaggtgggaggattgcttgagcccgggaggcggtgaacaacgatcatgtcattgccctccagcctgggtgacagagtgagactctctctctcaaaaaaaaaaaaaataagttaaaaaataaataaaaaatttaaaataaagttttaaaaggactttaaaggagaaaaatttttcaggctcatgcccagcaggaacaaaaagcacgcatctaggatgtgcatggccttctgaacttacggctggttcccaagtggtagtggccccgttggtggctgacttcaaaaatacaagtttgattttttttttagacatgtttggagagtttactttttatttatttattgttttttttgagacggagtcttgctttttttttttttttttttagagacggagtctgcactcacccagaccggagtgcagtgatgtgatctcggctcactgcaacctctgcctcctgggttcaagcagttctcctgcctcagcctcccaagtagctgggattacaggcacttgccaccacgcccagctaatttttttggttgcgccatgttggccaggctggtcttgaactccggacctcaggtgatccacccacctcggcctcccaaagtgctggcattacgtgtgttagccactgcacacagcctggagggtttattttgttggttttgttttgtttttttgttttcagggaaaatttgtatttttgatatttggtgcaggagaagtgtgatacttttctgaatggttagaactttaatcagataaactatatggataaatagcaaagattgttaagactgcctctctcttctgtatcttaccaaggctggacagtcttgtgaaattgagactcttactccactcatccatcgctgcaataagctcatcctagtaggagatcctaagcagctccctccgacagtcatctctatggtaagttttttatgttcagattgctttaaaatggaaggggctttttaaaatttttgttttcaggagggagagacatctttcttggattggcctcttaatttggagggaaaagtaagcagtaactaagaaaagagaagcacttaataaattttaaaaaatgcctaaaaatgtccatttggtcatagttgttcttctgtgtatgtgtggcagaagcagtgtggcagggacttggaagcctagatggatgacgtgccatggaaaccaagctttgggaaaggcagtgtgcatgtctgccttttttaagtctcttaagagctgaatctgatttattttaatcatacaaacaccaaaacaataataaaagaaaaacttcagaaataaagagaagaatcctaccctcctcatttttgtttaaatatgtacaaattgaggaaaacatgaagttaaattaattttggagtacatttccatttttagaatttggtattctagtgttaatacaagaacatgtctgtgcccttcacatcatctgaaagtgaaggtacaggggaaaaaaagactcaattacaagctctgactttgggaagagaagaaccagactgtagtctactcttctctgttggttttttttaatctcatgaaagattctcctggaaatgcacattagaatcaggatccagtagatgttttgaagtaatctgaagaggttttgaaatttaatgaaatgtgtattttttactaataacatagattatttatacagataattgagcagtggcttcataaataatcctagagaacagatcattttcaaagcatttttgttgaagcttggaatgaatgcaggtggttatcgttagtggtttttgatttcggaattattcagaatgatagtgcagttctttgtatgacatttgagcgcaggtacatgatcatgttagagtgtggcccagaagcacacccgtcacccagtgaaaacccgtgtgtgtagggaagaactgctgcaggtaactttgttcacggagaataatgaagagcaaattctgtatcccatttctttaaatgatgcaggatttcattgaagggccttggcatatagtgaaaagagagattgttaatgggcctcaactttactgcctacttcaatgattgataaaaacaacaaaaattagaaaaaaaaaatccatttgtgctgtttaaattgttgtacaaataaaacaggctattttgagaaaataattacaaagttcatttccataaggtgccttttttgaccacctgtttctagtggtaattacagtgaaagtgagtatttttaacagatattgctaggcatttgtgtgtttattcgtctttttcagtatgtatatattgagtgccaccataattcaggcactgtttaggggctggggttatgacagtgaagaaaacagacaaaatccctgcccttatggtgtttgtattctaggggttaacagtgagtcagttactaaaaagtggtatatggtttgtatacatgtatatgtttatgtgtatatgtacgtgggtttggttttgtttaaaggtggcaaaatcattctgtgcagaattggtttttttttcaatcagtaaatcagggacatcctcccatgtcagaatatatattaataaatctatgtcatttgtagaatggactaaggttttgtctggaggtagatgcgttaccttacataacttccttttctgtttccccaaagaaaagattaaaaattaggttttgtgagctaacgcagataaacttttgaggatttagggaaaattggcatgtatctattaataattattttatgctttcacaaacctgtttaaaatcacacatataaataggttaagaagtaatgcctttcttccactcccatagtttgtgaaacaagtttattcaggctttgcacgtcttcagtgccagtatctttcacatcactcatgaagattccatcatcttagtgaagttttcagcacatttttacttcagggttatttaagataaagtactttttgaaacttttcttttttaattatactttaagttctagggtacatgttcacaacatgcaggtttgttacatatgtatacatgtgccatgttggtgtgctgcacccattaactcgtcatttacattaggtgtatctcctaatgctatccctccccctcccctttttgaaactttctgtgttgctgccatcggaaagtagatcccaaggcacaactgtggtaacatcaagacagtttatcccacttgtcacttaggtcactgtttttcagattgcagaatataacccattatttggtttgtgaaatccatttagcacagcttcggcgttcctaattcaaaaatttgaaatgcttcaccatctgaaacttcccaagtgctgactttatgcttaaagttcacgctcgaaggatatgctcattggagtattttggatttttggattagggatggtcaacacataagtcgagtctgtttccttcactggaaattaagtcctgtgagacttcatcttattcactctagtggtcttagcacttcaaattatagatgcttagtacatattagatggatgaatgaagaattttgtcttcaaaaggcttgtttacagtggcattcaatatgtctgtctgtgagggtgtacccccagaaataattgttaaaatctgtgttacatttcctttattactggtttttttgggtggcgtcttgtagcatcaaaatagcatcagttgtctttcacaagatcatatctctttcattagcagtatatgagtagaaaagacctccacatatattcaagattcatggcattttggccaggtgtggtggctcattcctgttatcccagctactcaggaggccagagacatgagaatcgcttgaacctgggaggtgaaggatgcagtgagctgagatcacgccactgcactccagcctgggtgacagagcgagactgtgtctccaaaaaaaaaaaaaaaaaaaaaaaaaaaaaaaaaagattcatggcattttgaggctcagagtcagaaacaccttttttctctgaagctgtggttggtaatcttatgctacctgaacgttgccatatacgtattagatctcagtaattgtgtttataatagtgggaaagatataaatgaattcttggaaactgttgctttattttgcccctcacagaaagcacaggagtatggctacgaccagtcaatgatggctcgcttctgcagactgctggaagagaatgtagaacacaacatgatcagcaggctgcccattctacagctcactgttcagtacaggatgcatccagacatatgcctcttcccttctaattatgtttataacagaaacttaaaaacaaataggtgagttccccttattgtttgtgaccttattttgttgtagtttagctacttatgaagaatagacattttactgtcgtcttaggtcttgtcataaaaagcataaatcatgaagggttaataattttgtcctgttataatagccatcatgttgaatacagcaaagcacataaaaaagaaaaggggaaaaagtcacctatatttatactacccagaaataatcactggtaacattttggtatatccactttcagcagtcctttttttttttttttttttttttgaagacagggtctcattctgtcactcacacaggatgagtgcagtggcacacagtcctggctcactgcagcttcgacctcccaggctcaatcaatccacctgcctcagcctcctgagtagctgggactacactcagtcaccaccatgcctggctaatttttgtatttttctttttgtagaaacggggtttcgctatgttgcccaggctgctttcgaactcctgagctcaagcaatccacccgccttggtctcccaaagtgctgggattacaggcgagagtcaccgcacctggccaagtttcagtccttttactatgcatatctttttttactttttaaatttttgaaggaaaaatgtgggaccatacttaacatagtattctgtggcttactctattatgagtgtctttccaatcatacttgttatattttaatgatatagacacctctcccagcaccaggaaagaaatagaatttgttttgtacctttcactaatacacgtctagaaaagaatattcctgctatccccttacttgccccagcccacatcaccacacagaaaaaattgtagtaataccaagatattttcttaaatcttgactttattctgaatgttgactgcttttttttttttacagacagacagaagccattcgatgttcatcagattggccatttcagccataccttgtgtttgatgttggagatggttcagaaagacgggataatgagtatgttttcctcttgcctcagtcctctgatagtcccagaattgttacatgatttgcattcatatttctgttaaatacatttcctatacacatctctctgcctagtgtcagggcacagtcatgttcacttaagttgatgcttcttttttctgtataatggggataatattacctaatgtcataagcaagtgcttgagtagatacttgttgagctcacagcagtgagggaaacagacgtgcccattgcaagatggtggtctcatgggaagacaggccttcagcaggtcatcacctgggtaagcagttattccagttgggttaagtactgtgaaggctaagtataaattcagttgaatgaaaatgtgaaagggaggaaggaagtagtgacagaggttggatggtattgggttgtgaataagggcatgtgttcaggtggtctgtatatgacagcaaagaggagtggtgttgctagaagcagcaatgtcagaggagctggggattcttgtgagagagtaggggaggaatggtctaggggcagcatttgttggcacggatacaagtgccactctgtcatgaagtaggaggaaacacaaatcccacttctacatcatgggatggctgcagagcaggtggcgtcctcaggcgagaatcaggcgttagataagatacagaggtggaagtagggaacactcattgaagaggttacacatacagaggagttgttggccatgggattgtagtgctggagggactgcagcctaaaggttttaatgaggcctcttggaggagagcagaggattgcgagttaagccgcagagcatcatgaggatttcagggatggaagagatcgctagctgattgggttgtccatttagtaagtctcaaagttaggagaatgggtatttaaggctcgtaaagcaaggcgggtaaggtagcctcaggaatcaagggatggggcagtgcatcccctggtcttggtgcattttgggtccggtatggtcatgagggagcatgtgttttcaggaggggttgagagtgcaggatatgaggctgctgaggactacaaagaggacatgaacctgctccagggccccatgttgttcaactggggtcaagtgggacacatccttcacattgagtctgtgtggatggcagctgctcggttgtgtggtgtgtgttgtatgcagccagtggtgagggacaaggaagatcatacatgtaaagcattttctcagtgttcggaagatagttaatccttaattcatgttagctatctcttattcacatctttgttcttattaatactgctgttcttaatactgctctccctgtttcaacagatgaagaaagtggtgcctaaacttcagttgatttcaaactcttttctctctacaacttcatttttcactgggcatttcacatgtattcatatttaccatagtattttcacatttattcatatataccatattaatggtcattgtaacagcctcttggagtcactgctagctgaataaaagatgaagcctatctgcctgccctttactataatgggaaacaaactcagtggaacttaagttagcaattagcctgctattagttttgataacactgtgttttctttttccatcttgtttagctcatatataaatgttcaagaaataaaactggtgatggaaataattaagcttattaaagacaaaagaaaggatgttagttttcgaaacattggcataataactcattacaaggcccagaagacgatgattcagaaggatttggacaaagagttcgatagaaaagggtgaggcatttttataaatatttccaattttcttgttgaattagaatgagaggatatagaaggaaagaagaaaagggaaactcttaaggagtggtctgtgcaaattggtgatacggcacgaggaagctgggatgctgctggctttcatagacttgtgctgtgtggctcctgggtagacaggttacttcctggcagttggaatgtcaacattctccttggcagtggaattgactaagaaacttgccaggtctttaccttttagttccatgacttgttcatctgaattcttgttctagcaagactaaaagtaacatttcactttaaataaatgatttaacccttgtattgcctttatgtatagaatgaaaatcatgtttttgtttccttcttacctcagcagtaaaattaaagattaaatattggagatccataaccttaaaatcatcttaacttagaagcacacagactaccaaaatcgaatctagaaaacaatagaaaatcagacctgtaggctgggtgtggtggctcacacctgtaatcccagcactttgggaggctgaggcgggcagatcacctgaggtcaggaggttgagaccagcctgggcaacatggtgaaaccccatctctactgaaaaaaaatacaaaaattagccaggcgtggtggcgcgctcccgtagtccctgctactcggaaggctgaggtaggtaaatcgcttgaacccaggaggcggaggctgcagtgagctgagattgccccactgcatcactccagcctgggtgacagagcgagactccatctcaaaaaaaaaaaaaaaagaaaaaatcagacctttataacaaataatgaaacatttcccaataatgaaaagcccagaaccaagctaagctggtgaattctatcaaatattaaaagaagaatgaacacaagtcattctcacatgcttccaataaatagaacactcagattcattttttgaagccagtattacactgataccaaagccaagggaaagtatcacaagaaaactacagatccaaatcctttatgactagatacaaaaatcctcaacaaaatagtgacaaactgaattcagcaggttattacaaggatttatacatcaagaccaagtgggatttatcccaggaatgcaagattgcttcaacatatgaaaatcaatatgatataccatattagaagaatgaggagacccacataatcagctcagtagatacaaaaaaaagttgcacggaacccaaaatgctttgatgatttaaaaaaaaaaaaagaatacaaaggaactttttttattaataaaaggcatttacaaaaaactcatagctaacgttatacttcatggtaagaatgaaagcctttcctctaagatcaggagagatgtttgaaactcttaatgctttttttcaacattgtactagaggttttagccagagcagttaagtaaggaaaataaataaaaagcatctttactggaaagaaaaaagtaaaactctctcttcataggtggcatgatcttatttctagaaaccctaacaaagccattcaaaggcactattagagataataagcttagcaggatacaagattaatatgtgaaagttgattatattttgatgcaactagcaatgaacaatctgaaaaggaagttgaaacaattccatttacaatagcatcaaaaagaataaaacacttcggaataaatagaaccaaagaagtataagacttgtacgctgaaaactgcaaaacgttgttgaaaggaattaaagaacacctaaataggccgggtgcagtggctcatgcctgtaatcccagcactttgggaggcccaggtgggtggatcacctgaggtcaggagttcaagaccagcctggccaacatggtaaaatcttgtctctactaattatacaaaaatcagttgggcatggtggcacacgcctgtaatcccaactactctggagggtgaggcaggagaatcacttgaacccgggaagcagaggttgcagtgagctgagatcactccattgcactccagcctgggcgacgagagcgaaattccatctcaaaacaaaaaaaaaaccacctaaataaatgtgaagacatcctgttttcatggactggaagacttagtgttgtgttgttttttgcattttttgtgtgttttttcatttttagtagagacaaggtcttcctaagttgcccaggctgttctcaaactcctgagttcacacagtcttcccaaagtgcttggattacagacatgagctaccatgcccagccaaagacttagtatcagcgtgaccatttctgtaaaaaaggcagttggattacatctgtagatcaatttggggagcgctgccaccttaacactaagtaaataacttgtactatgtggtacaatgaaatattaatgaagaaagggatgaagttctgttacatgctacaacatggatgaactttggaaatgttatgctaagggaacagtcacaaataatcacattttgtaattccatttatgtgaaactcacagtataagaaaatctgtagagacaggaagtgtattagtggttgccagggaatggagagaggaggaaattcaggctaacctccaagaaaatgtttttaaaatgtcttagcagccgagcatggtggtgcatgcatctccttgggaggctgaggcaaggaggattgcttgagccccagaagtttgagtccagcctgggcaacgcagtgagactctgtctctctctctctctctttttttttttaagtttctttaaaaataaagactgtaaggccaggcatggtggctcacatctataatcctaacattttgggtgggtgaggtggaaggattgcttggggccaggggtttgagaccagcctgggcaacatggcaagaccccatctctacaaaacatggaaaaattagggtggtggtccatgcctgtagtcctagccacttaggaggctgagacggagctcaggtgttcaagttactgtgagctatgaatatgctggtgcactccagcctggacaagagtgaggctagactgtcaaaaaccaaaaaactaagccggacgcggtggctcacgcctgtaatcccagcactttgggaggccgaggcgggcggatcatgaggtcaggagatggagaccacagtgaaacccagtctctactaaaaatacaaaaaattagctgggcatggtggcgggcacctgtagtcccagctactcaggaggctgaggcaggagaatggcgtgaacccgggaggcagagcttgcagtgaactgagatcgcgccactgcactccagcctgggcgacagagtgagactccgtctcaaaaaaaaaaaaccaaaaaactagtttataaatatgtatacttaataattatcttcctttttccagtaaatatgtttctcttttgtaaatagaccagcagaagtagacactgtggatgcattccagggtcggcagaaggattgtgttattgttacgtgtgtcagagcaaatagcatccaaggttcaattgggtgagttactgtcattgttgctcttttatacttgtatacattgttgcttgtttatagttcaggattaggttcattatcactgttagagaacaccatttgcttttttaattttcttttgtgaaaacctgtgtaatactatgaaagtttctcttttaagttgtgaaatagacccactgttagatcttggtgcaatcttggcccactgcatcctccacctcctgggttcaagcgattcttctgcatcagcctcccgagtagctgggactacaggcatgtgctaccacgcccagctaatttttgtatttttctgtagagacagtgttttgccaggttgcccaggctggtctcaaactcctgagctcaagtgctccacccactttggcctcccaaaatgctgggattacaggcgtgagtcactgcgcccggccttggtgtcttttatattaacccatttcatagtgtgaatctgttcttttatttaataagattcaaataaataattagattatactttgcagaggcatattactccccatggtatgtgtcaaagtgtcattgttttctgtgttttcctgctttggctaaatttgttcaccttaactactgtcagtttatttaagatgctaaggacacctgtatgagtgacagaaaatatcccaagcccaagactcttacatgattatttgtttcttgtcatgagaagcagacagaatttacaggttataaattagttcgttttcaaataaaatagtaattaaagtaatctttgcccctccctgggatgggctgcatatacagagcccagttgtatctcagggtcagtttataaatagacctttctttcccagctaatttgaaatttcacttttatcatacatcaattctatttctgagctctttttctgatctactgaaatatttatctggtgttcatgtatttctacactagttctacaatatcttaacagtctagatatatttaaatgtaagaataaagtgattaggctggtaccacatttttaggatttttcaaggcttcaagattgcactgttaaaatttccaattatcttatccaggtaaaaataggaaattgatagatgcatcactttgaaggaagccccgaggttttggtttgtttcctgtttttaataggaattcttctgtgcccggtaccctgtattgggacggagagtaagaaagcactgtgacttctagaggagtgaaggagtcccggaaaagctgcctgcagtccacctgtgtctcacatgggcatgctgagtcattctagagttcacctgtgtctcactggcatgctgagtcattctagagtccatctgtgtctcacatgggcatgctgagtctagagtccacctgtgtctcacacgggcacgctgagtcattctagagtctacctgtgtctcacatgggcacgctgagtcattctagagtccacctgtgtctcacatgggcatactgagtcattgtagagtccacctgtgtctcacatgggcacgctgagtcattctagagtccacctgtgtctcacatgaggatgctgagtcattctagagtccacctgtgtctcacacgggcacgctgagtcattctagagtccacctgtgtctcacatgaggatgctgagtcattctagagtccacctgtgtctcacacgggcacgctgagtcattctagagtccacctgtgtctcacatgaggatgctgagtcattctagagtccacctgtgtctcacacgggcacgctgagtcattctagagtccacctgtgtctcacatgaggatgctgagtcattctagaatccacctgtgtctcacacgggcacgctgagtcattctagagtccacctgtgtctcgggctcactgagtcattcaagattccacctctgtcagacacgggcacgttgagtcattctagagtccacctttgtctcacatgggcatgttaagtcattctagacaaagaaggaactctttttttattgcctagattcctggcaagtttgcagagattgaatgtcaccatcacacgagccaagtacagcctcttcatcctcggacatttgaggaccctgatggtaggtaccagagagctcagaagtttacccattgttactgttgttggattgagtttttgttcttattttccatcaaagtgtaaatgatttctggattacaaaataatggttgttatgttttccagcaacttcttcctaggagcttttgtgtacacgtgaaccattcgccttttttcagcccagaacccaagtatctacactgggctctcaaggtgaccattttaaaacaaattatccacatcataggattattgttaagaaggtatattaaacccacagatgtaaagtgccaaagcaattgcttggcacttagtaaacactcagtaaatgtggctgttattggcccagcttaatgccagagagagtttgcaggcgcgtgctctgctctgcttttctgctggcactgggagctgtgctgctcactctgtttctccagcacttagcgcctccggcattcttctgccaggacaggcgcccctctggaagaggtgtacgagtttccaacttcagtagacaaatggtacagcttaattcactgatatcacagctagatgtagcacgtatttgctgtttgtcttattaggggtaataactttgtagttttcctcatttctcttttttatgaagtcattgatttcatctaagaagagccaacttggtggctgtttcccctggttttggttcctgccaccaggtggcgctcagatacaccttctttcttgtttcactcctctatcacctccagcctttgtcgtctgtgtgcctgctctgaaggaagttttaaaagctgtgtaccgtttatttttatgtacctcctatttttaagttgatagaaaaaatctttgtaagtttaaatattactgaagattatgcttctgatgtattatcaatattgacattttaaaatacagcaattaaaattattacatcactcttaaatatatccagtggaatagaaagcaatattattttattttttcctctctttgaaattgtacttccattcctgcttgtttaggctaagattcactggggtaatctctttttagaattaaaagcctttaagttaatctcactgatctacacctctctcacaaaaatttctgtataacttgaaagtttaaaaagttgttttcccctggcgggagtgcagtggcacaatcacagctcactgcagcctccgcctcctggatttaagccgttctcccacctcagcctcctgagtagctgagactataggcgcatgtacctaatttttgtacttttagtagagaaagggtcttaccatgttgtccaggctggtctcaaactcctgggctaaagtcatcccacctcggcctaaaaagttgatttttatcactatttggggaacccatgtgaagggtgcatgcaacctctcagtactttccttgcaacttcctgtaaatctatagttatctcaaaatgtaggtttggatttttaaaaattgcttttcctgtgaccataagcatctgagtgttaaaacgtgatctcttatcaattgaatagcctgttaacacttatttgtacagttgagcaaaacaagacaaatatatttaatatcacagattttgatcatgtttaaacctgacaagtaaatgaaatgttgctagagatacatcttttagtgatgccttgattaaaggaggctttgtgggcactactgtttttcatcctcccttaagttggcacctcatggtgttgatgtgtcttggcagtgcactctggatggatgaggcgcatcatgattgtgaagggtggggtgcaggaggcagggcagcccaaggaggacatgggaagtagggtttgcaaggttattctgtaaccctttttcacattccgtttagacagtgtttgggagcccctgggtcacacttgcacaactgtgcagaccactgacctccagctaatggcaccgacattgtcttcactctaggaaggcagtgctacaaaaagagacagacgagaatctgaaacttcccgacatgtcagctgggcttcctaactttttttgtccttgggctttttctttgttgttttggggattcatttgcttttgtttctaagtttttagcctagttccccttatgggaatgggatcaatcattaaagcgtttgatttcctctgagaaaccaaggctaatagtgcctgctcagaactgtttctgtgatcttaggaatggattaaacaccaagtttaggtgtagtgaacttagcaaaaattgcaaggccatctgcttcacatatgtgtttgagccacaggctaaggatctctagagatctgagtgagaaagagaactgagcccccagagcctggcgctccctccacagacctgtcttcagtatgccagccaccgggccaagcattttattctggtcacatgactttctccaaaccttgaaaaactactgtgaagtcagcttattaccatagttcatcaaattcaagaaaccattcattataatatacaccactattttatgtaccattattagactatgacacagtgccttattttcacttagaactttcatatttattgaaaggactcttaagactttagacagatttttaccatattcttatccatacatagaaaatacaagtaaaataataggttaagatattcctaaaaatatttcactttcagaatttagcacgaatgaatcacttcccaatccatagtcatcagtgttgtcattcatcccaagtgcaataataaggttggcaatttagcatttgctaagagttacaccattgtctccaggatttcttagaaccctttatctccagtgtataaggtttttttgggggtttttttttgagacagagcctcaccttgttgcccaggctggagtgcagtggcacaatctcagctcactgcaacgtccgcctcctgggttcaggcgattctcatgccttagcatctcaagtacctgggattatagctgtgcaccactacacttggctaatttttgtatttttagtagagacggggtttcaccatgttgcccaggctcgtcttgaacctctgacctcaggtgatccgcccgcctcagcctcccaaagtgttaggattacaggcatgagccactgcacctggcccagtgcataagttttaatgctggtgttatcttgtcttatcagaaaatgtctgtagaaggttttcaggcattatttttaaatggtttattgactaaaagtctaagggttataattgcctcatcatgtaatttccaaggataggtacatggccaagaggctccccaaggtcagaaatgctaaaatgtgaaagcaacgtgcactttagaatccattaaataaaatattactcctattttacagatgaggaaacaggctcagagaggtcaagtgacttgaccaaggtcacacagcaagtaaatactgtgcagcctcactgcttccctaacatacctttatgaacagtacaggagcccccatgagagggtagctatcctttttcttcttttctttcttctttctaaagagacccgaattctagtggttgtaaagcagcagcctcctctgaagaaactcgggaagagaggagaggtgcatgtgtttggcaactttcccgatgggatttaatatcttaagctcctgtaggaaacaggcagaaagtgagatgatatcttgagatctcggtggatgaagatgttttagccattcggggtttgggaggcctttagaaatccagtgaaagccttgggcctttttctagaatagtcacatgcactcagaagtttgctttctgaaaccagaccttcctgtttcagaacgttagccctgccaagaggtgtaggcagtactctagatcaccaatgtccaaaggacctttctgtgataacggaaatgttttgtgtctgcactgctcagtacaatagccattagtcgtgtgtgaccgctgtgtacttgaaatgtggctgatgcaatttaggaacagaattttttattttaatttattgaaatataaatagcaacatgatgctcctagtgactagtgcagacctgcgttgcagttgaatgcactgataaaaatggctgaagttcggccaggcacggtggctcctgcctgtaatcccagcactttgggagctgaggcgggcggatcatgaggtcaggagatcgagaccatcttggctaacatgatgaaaccccgtctctactaaaaatacaaaaaattagccgggcgtggtggcgggtgcctgtagtcccagctactcgggaggttgaggcaggagaatggcgtgaacccgggaggtggaggttgcagtgagccaagatcgcgccactgcactccagcctggcaacagagtgagtctctgtctcaaaaaaaaaaaaaaaaaaaacaaaagttgaagttctccattataggttgtgaccaggtcttatttttaggaatgggactttatcattttttatttgaatttattttttcctttcatccttgtctgacgagtaatgaatcttgagaatatgttcatacaataatatgtattatttgttcagaaatgaaagctggaactctatgcttcccaagcagtgtctctttggggtgtaattatttctcccttctcattgtttcaaggaaaaccagcattggaatcagctgattcaggatgctcagaagcgtggtgccattattaagacctgtgacaaaaactatagacatgatgcagtgaagattctgaaactcaagcctgtgctgcagagaagtctcactcaccctcctaccatagccccagaggggtccagaccccagggtggtttgcccagcagcaagctagacagtggatttgccaagacatctgttgctgcttctctataccacacaccctctgactccaaggaaattactcttactgttacttcaaaggaccctgaaagacctcctgttcatgaccaacttcaggacccacgactgctgaagaggatgggcattgaggtcaaaggaggaatattcctttgggatccacaaccctcgagcccccagcatcctggagcaacacctcctacgggcgagccgggcttccctgtcgttcaccaggacctgagccatatacagcagcccgctgctgtagtggctgctctgagcagccacaaacctcccgtgcggggcgaacctccagctgccagtcccgaggcttccacgtgtcagagcaaatgtgatgacccggaagaggagctctgtcacaggagagaggccagggctttcagtgaaggggagcaggagaagtgtggttccgagacccatcacaccaggaggaactctaggtgggacaagaggacactggagcaggaggacagcagttccaagaaaagaaagcttttataggaaagcccagtgacatgggccagcagccacagcatattgtaaactgaagatgaccagctcgtgggaccatctagataagcttgttttttgtaaggagtttgtgtgctgttggaaaacatggaaaatgcatccttaacacctgagcctctggtcatcttcagtattttctgtcatttgcaaaagctttcagagggcattgtgtatccgtaataatgtccttgaagtcagagactggaaatgttgatctcttagtcttctatagacaaggaggtcagactggagtgaatgttgtaaaagttgaaatgtatatttgtatagcaaataacaaaatccttttaaaatttaatctagtagaccgcttttctttccccctgtttaaaatgttaatcagttttcaacagaacaaactttatattaccaaaaaaaaaaagatgggaggagggcgggtcctttcaaccattgttagagcaagacagataattatttaacagcctagcttggaataagctgagttagtgctggtgggtcaggtgtctctggctctattaaaaaaagcaaaaacccccccaaaaacctggagtctcctaggggacactttgggcagcacggttatgttaggtaaagtcttgctgacatggtgcatttttagatagagtgcattggcccagggtattatatttctgtgatgagttcatttacctgtttcagtatgcacatagttccctagctaaaattcctaatcttcttgagagagaagaatatggagtgaaagaataattcttgagctatcattcaaatgctcccagcatattgtgagccttgtgtgactggtgaggtacagacatttggttgccaaatgctagattagcgctgggtcagctgtggaagaatcgcctcagcttacagattgtcagacagatctaactagttttccagaaagcctgggaagctgtgtgttcaacatttcccaagggattctgatcaccaggcagcttgggaaccactggggcaggccaaatagaatattttgggcgggaaagaagcacccgatttaaaatgaagcgtaaccagaggagttcagaactgggaagagagtggtagacttcctgtgatcttcagaaatcatctacctggtaaaaatacatgctgtttagaatatctgataggtgtttccagctactattagaggtgatagtgcttttgtgggggaaaaaattggtcatggtgaatggagatcgaggaagctcgggacaagggaggggtgggctgcctgattttgtccagttttccaaatatccacgcagtgaactggagtatcctaaacatgagaatgtacagttgacagttgtaaaaactagggatctgtagtgaatgctgtgcagccccatatctcatttgggggtaggaaaatagctgaagattcatgtgcattatttgacatttcctttgtcatctgctttttaagcaaaaaagggttttgtgttagaaattctacttgagcagattataaagagctttaaaaaacaactttcggttgccaaaagtttgagcatttgatttcattacctgtgtctccctcactggtgtccagacggtcaactgaatactcctgaaacccagggagcaggtgacttcctggagtgctttgtccccagagtcagccactgcttcctctgtgggggtggagagtttgtctttggccatgcagtgtgcgacagttcaggacgggtagggatgggtcccattctgtctgggtcaagggctctatcagcttcttccatgtgcctttgggaagaaatctcgttactttaagtttgctttcctgttatcttgatgaagtgcccattttagcagacacttgtagtgctgaccacttagggaatgtacaaactcctaagcttctaaagggaggcatggcaaaaacgttggggtcaggatgtctctcacgctgctcatgttaatactattaacacatgatttgagaaataagttttctctaaaatgcatattttgccgccacacactgaacaatattatttccagtgaagtttgatgcctgttcttacgttgtgttcacctgttggttcaccactcagcagatctgattctgcaagaattaatggtagaactagatcatcctttctaacagacgagcctgtgtcctgtgacggcctttcacagcggaatgcagttgtacctcacattacttttgaaacttcactcgttccagttggtacaagtatttgccaaagccatttcctatgttcaccgtggcccctcctgatgtggctgtcagcgcagcgttgttgaacagggctattctttttacaaggtgtgaagtgtggctcttcgcttcgtctttgccatggcattaaaagaaagttccctgtcttctttcaatattagttatttcaaatgaatatgtgctacttaaaagcttgttttgtttctttgtatataatttgccttggatttattgtgcacagtttgttgagttgtatgtttttgtgaattatcaggagtaaatttgacaagtacatgtgaataacctcctgtaaatgaattttataacaaaaatgtactgaactattttttaaagttgtgcagattagcaattttttgctatagctttgacttttctatgctgtgaattaatagctgcgatttggcaaacagccctgttgtctttgttaaaccctaaattttaagaggaaatggcagaattaaaagcagaaacaagaagatggacatggattagaggttatgtattatgaagtaaactacaaggtactaacatcatttcgtctgccatttggtttgctttatgctgaaattacttggtggggatttgtgcaattcagatataaaaagtttcattatcca

SEQ ID NO: 228 - DNA, 445 bp, Homo sapiens
gccacattccagtgcttcaaaggagtatctttctccttgagcacagtgtttatagataggagagcaggtcacattctggtcatgggaacatgatggcaattagaaggctttactcctcagaggcctcttgtggctttctacaacttactgttccatatttttatggctggtttatgcaggcaccccacaagccctttccccaacatgagagaactgcttcgtttattttatctcatcatttttcttgaaactattttgctatggaatgtcctactgaacatagtttgaaaatgttactgtaatagaatctcaactctgtagtgtactgtttagatggccttgctaacctttattaggtagaaatgataactacttgccttataggattgttaggaacaatatctgaaataatgtataagaagtttgtggtgtagtccctggtgtc

SEQ ID NO: 229 - DNA, 5363 bp, Homo sapiens
cccttccccaccttctccagctctctcccactggttcctcccctctcaactgctctggttcttataaaaacctcacagccttccactaacatcccgtaggagcctctctccctactgctgctacacaagaccctgagactgacctgcaggacgaaaccatgaagagcctgatccttcttgccatcctggccgccttagcggtagtaactttgtgttatggtgagaaacttttctcccatttctctgtgtttacttttctgcctctgactttggcttacttctatttttcctctccctcctcctcttcttccccctttctctgttataatcttaaagtaccattactttcacatttcccagtctccgcagaaactgatctgttctattaagtcttttttatatcctaaatatccagagtcttatgcaacttaacaggcaaacccgttcagtggtaagtctctgtatatctagaaactcatatttcagaaagaagataccaaattcccagccccctgcatcctcatttttaaggatatttatttagactttggtatcaatgggttaagggtattgtttaaaccacttgcctttgagaaaatccatttttatgtgaagtattaagtatagccctttctagggactggacaatctcatgaacttactatgtttgttcagttaattaattttaaaataaagttttacatcaaaagaattttagaaaagaatcattttcataactcctgttgtcagaaaataaattttgcctgttttctatatgtcattaaatatacctgcatttgttcaaagcttataaaaggaaatctgaagcaaagttatttacttatttcagtcttttgtttcaattacctagatattttcattgttttaaaatttaaattacattaacaaccataaagattatgcttctcactcttgtattcacaaattttctgtattagaggatttgatttcttcacctcctttttaagttttgaagaaaattcacttgctggcaaatattaatagaagcttcttattccaaaatttatctgctgtgctcaggagagtggcagaaagaagaaaacttcggctttgatatcgtttcagttctctctctgaactggcatcgtgcccagggtgagctgtcagctggagctagtggtttctgtggctgccaatttaacacaggttcttaagaggctttcggaaccctcttagaaacctgccctagtaagcccagcagagcaactgccctgtagttctcttgcctggagaaacctggctgtcttctggatccttcttaatcctctttgaccctgttctcaaacaggctctgaataaatcagagaagaaggttctctggagacttctgtacagcacttaaagtgtcttattttgcttgtctgaagacgtcatagcccttgggaaattttagctgaaaatggccactccctccttcaacatcagagaaactaaaatatagagatatccacagcaaggccagagctagagaaaaacctcataaatcctaaattcctgaaatttctaataaccacactgctaaatatattcttcatgtttttagactctttcctcttcttccatccctgtatttaaactatcacagtgtctaaattgataaataataacataatgaatcatggataaatattgatataatgaatcttttttttttaatttcagaatcacatgaaagcatggaatcttatgaacttagtaagtgaatatttaacttctttattcaaatcccttgcattaaagaacctcttcttatttttaaataaacaagatggaaagatatataacagggagggaaaagggggcctcttttggaaaactaaagtaaatttttaaatctaatgactataaaaattgccaaaggagcaattttttaagtttgaagtagtgcaatatgggatttaagctacaggcgacatatttagaagccataaaatctcatttggaaattttaaattggcaccacgtcaactgcacagatggaaaacgaggagtaatgacaaatggtaaagcacagagctggacgccaagtcagctgggagaccacaggcgccacgttaagctgagtgctgttttggtttttttgtgtttttctttcttgtttttttttttgagacagtgtctcactctgtcgcccaggctagagtgcagtggtgtgatctcggctcgccgcaacctccacctcccaggttcaggcaattctcatgcctcagcctcctgagtagctgggattacaggcccatgacatcatgcctggctaatttttgtatttttagtagagatggggtttcaccatgttgtccaggctggtctcgaactcctggcctcaagtgatccacccaccacagcctcccaaagtgccgggattacaggcatgagccaccacacccagccagctgattgctgttgaatagctggatttataaagactgagcataggaggaaatggcacatcactctcatttttaatttattcattatttttatagtgtttaaactgttcatgtatcggcaatctagttatgcttcataaatcctcaggacagagaatttctcctcaaaaggaatttaaaatctaccaagtagaaatacagaaattaagaaaggcaaagtgatcgtccaaactcaaaaccaacaaagcctatatgacaagtctctaagacacatggattgattactgatttcatttgatcaggaagttaatgaaatctactttatactctcctttaatttttgccaatctccgtttatatgagttgcataagttaaggcactttcaaatatatttgtgtcaaggaatattcacggaaatatttccagctatgtgtcgctaaaactgcatttatttattttctgttctaagatcccttcattaacaggagaaatgcaaataccttcatatcccctcagcagagatggagagctaaagtccaagagaggtcagtaacaaaacttcatgaggagtggtcatttttcccagtgtagatcacagatctgaattggagtgggaaacagctttttcatcatatacattatttctaattgtatctttaaaatcaaaaaacttaaaagcaatattcagaaaacaactgaattattagaaaattatttggggaaagatccggaaaggagaaggaaggaggagagaaaggaggacagaaagaaaacttctattttcattaaaaaaaaaaaaaaaatctcctgttctgccttccctccctggttttttttttggttggttggttggtttttctgagacagagtctcactctgttgcccagactggattatagtggcactatctcgtgcctcagcctcccaagtagctgggattacaggcacgtgctaccatgtccagctatttttgcattttttgtagagacggggttttgtcatgttggccaggctagtcttgaactcctgacctcaagtgatccacccacctcagcctcccaaagtgctgggattacaggcctgagccaccgcacccagcctctccctgttctttaaatatctcttaatataggggggcatggagagaaagtctctccaatattttcttcttcttttccatttttgtatttttccactttatccttctcaattttggcctcttcttccactttctaggatccgagaacgctctaagcctgtccacgagctcaatagggaagcctgtgatgactacagactttgcgaacgctacgccatggtttatggatacaatgctgcctataatcgctacttcaggaagcgccgagggaccaaatgagactgagggaagaaaaaaaatctctttttttctggaggctggcacctgattttgtatccccctgtagcagcattacagaaatacataggcttatatacaatgcttctttcctgtatattctcttgtctggctgcacccctttttcccgcccccagattgataagtaatgaaagtgcactgcagtgagggtcaaaggagagtcaacatatgtgattgttccataataaacttctggtgtgatactttcatcttgtaaatctgctttcttttgggaagatattgagatatttaaatcatggcccaccttacccaaaataggagattctgttcatctcatatctagtattaattagaaaaataactacataaaaagaaggaagctaagaaggcactcactcagccataaattctctaaaccctctctaccttggaatccgtgaatggaatctggtatgttttttgcaggattttcctattgtaaattgtggcaaatacagggctcccttcatttgcttttcatctcttatgcatcaaagtcaaaaacatttctgaatcaagataatctagaagagaaaaaaggaggaaaaggaaaagagaaagcagaagggacaaataaaagcaattggcaaaaactgtcaataatagtttatacacttaactatatcaataatcacattatatgtaaatagtctaaacaatccaattattttttacttctacttatgttatatttttacttctacatttgttaaaggttccacgctacatttttactattcttgctttaaataattttaataatttcttttaaagtttagataataagaaaatatcccgggccaggcacagtggccacacctgtaatctcagtagccatgaccataccaatgcactccagcctgtgaaacagagtgagactctgtctctacagaaaaataaaaaagaaaagaaagaaaagatctcatatatttacccatgtaattttcatttcctgttttcttcattcttctttccatctggtgtcacttcctttctgcctgacgacttcctttaacgttttttatagttcaggtctgcaggattctttaagttttgtatgcttgtttttattcttgaaagatattttcactgtatattgaatcccaagttgccacgtttcttttaattattttaaggtattccactgaattctagcttgcacaatttttcgatataaaatttgttgtaattcttacctttgttccactgtgtatactgcatcttttatctctggctgcttctaacatttttatctttattagtgcttttgaccaaattgattcagacctatcttgatttgatttttcttatttttcttgttcttgaggcttattgaccttcttggattgcataaaattagaaaaattttcagccattattttttcagatactttgatccctcactcctcctctcctttagagggtccaatgacatgcacatttgaccacttgaagtaatccaactctctgatgttattttaatttttacaaattgcttttctctgtgtgtttt

SEQ ID NO: 230 - DNA, 582 bp, Homo sapiens
attaatgtgtcatcaggttcattaaccttttctttggcaatatctaatctactattaatttcatctagtgtatttttcatgccagacattgtggttttaatcaccagaagtttgatttggatgttttcatatcttccacgcctctacttatctttttaaatgtctttgatacatttaaattgttccaataactattttaacataatgtcagttatgggttggtttgattggttgattattctacttatgaaccacaattttctacttttctgcattcttgcttaattttatttgacgccagacatcatttgatgccagacatttatttgatgccaaaatgcagaaaattttattttctgcattcttgcttaattttatttgatgccagactttttgtgtactggatattcttctatttctgtatgtgttcctgagctctgctctgggattccgttaaatgatgtggataaaattgatcagtatttaatctaaggctaattatttccccacactgaggcaagacctttctgagcactgcgcccaatgtcccatgacaataatcgtagccctgagttaacagca

SEQ ID NO: 231 - DNA, 11172 bp, Homo sapiens
gggaccggcaagatggcggcgcggacagcgttcggtgctgtgtgccggcgcctctggcaggtactggattggctagggagactaggagggctgaccgggatagttgcttttaagtttccctgccaccagccgctctgcccatcaggatttttcctgatatttatccctcacctcgcgccgtttacaggaaagtgacgagaaaggggctagttttatcagaattctctcatggaattaaatataagttagtgagtccaggcaaagataggaacaagaataatcgtagaatgtcagagctggaaaagattttgtacttcgtatgttccaaaacccctcctttcacgcttgcaaaataaactgaggctcagagaagacaggaaatttgcctcgcgaaaattagaggctgagctggtgcaagatatcagactcttcccatggaactaaattgagatgctttcctggcatccaaatttagatgaaggtctcaagccagagaagtgggttagatatcctctgcgcagttatttgcaggaggagcaaaaacttttcagcagcggttctcctgctttttggccttgggaccactttacactttcggagttcaggactccagagagcttttgtttttgtgggtttttgctatctatatttagctttttggaaaataaaacttaagaatatatattgatttaaaagtaacactaactcattacatgttacaactaatactttatgaaaaatatattttctgaacaaactgagtaaggagcagcaatgttttacatttttgcagctctctttaatttctggcttaataaaagctagattcaaatctgcttctgtatttaatcttttcctatatcacacctcaggctgtcacgggaaaacttcactgtacactggtaagagaatgagtggaaaagttgtaaatgacgttttggttttatgaaaatagttttgatttcccggatcccctgaaagtgtctcagaccccacagacgtcctcagactacactttgagaccaccgtttttgtttttgtttttgtttggagacggagtttcgctcttgtcgcccaagctggagcgcaatggcacgatctcggctcactacagcctccacctcccgggttcaagtgattctcctacctcagcctcccgagcagctggaattacagtcatgcgtcaccatgcccagctagtatttgtatgtttagcagagacggggtttcaccatgtcggtcaggctggtctcgaactcctgacctcaagtgatccggcagcctcggcctcccaaagtgctgggattacagccttgagccaccgcacccggcctgaaaaccactgttcttgagaaaagtcagatggtattagagattgaaatttttgaactgctttattaagacaaatttacccagacagccctcccttccaaaccaccactcccccaacacacacacacacacacacacacacactctctctctctctctctctctctctcaagaaatacaaagaaaaaatgcaatttaaaaacttcttggccgggcacggtggctcacgcctgtaatccctacactttgggaggccgaggtgggcggatcacgagatcaggagatcaagaccatcctggctaacatggcaaaactccgtctctactaaaaatacaaaaattagctgagtgtggcggtgggcccctgtaatcccacctactcaggaggctaaggcaggagacttgcttgaacccaggaggcggaggtttcagtgagctgagaatgctccactgtactccagcctgggcgacagagcaagactctctcaaaaaaaaaaaaaaaaagaaaagaaaaaaaaaagaaaagaaaaagcagaggtttatagtgggagaatgtgactgagaagtgtaatattcttgctcctcttgcacaactcgattgtggggtcactggtgtaattgttgggagggaattttctatgcaattttgtctgaagaatggcacatacctcttaccactttgtgttgtacctgatttcctttttccttttcccctttggtgcaaagaagattatagagttatgatttgtctctatcttgggtaaggagaggaaggacaataagctaagaataggcttttaaaacgtggctaggtggtggttcactcctgaaatcccagcactttgggacactgaggctggaggatcgcttgagcccacgagttcaagaccagcctgggaaatatggtgaaaccccatctctacaaaagtacaaaatattagctgggcctggtggcccgtgcctgtagtcccagctatctgggagactggggtgggaggaccacctgaacctgggaggtccaggccatgatcatgcaactgcactccagcctggataacagagtgagaccttgtctcaaaaaaaccctgaaaaaacaaacaaaaacgtacttaggtgacaatcatttgtattaatgaaacttcacttatgctaaacttctttttttttttttgagagggagtctcgctctgtcacccagcctggacctccgcctcccgggttcaagcgattctcctgcctcagcctcccaagtaactaggatcacaaccgcaccgccaccatgcctggctaatttttgtatttttagtagagacagggtttcaccatgttggccaggctgctctggaactcctgactacaagtgatccacccaccttggcctcccaaagtgctgggattacaggtgtgagccacggcacctggccttattttcatcttcattgtgtttttaaggattctattgtgtttccactttctcaggttacacttcaaaatctcagaaaagttgaaaggaaaaaacagctgttatatgtagtagtatcgtttgtttcctaaaactggaaagtcttgttccaccagggggagctgatggtaaaggatttggaaatgtgggttcgttgtagcatgtggcacagtagttaatgatgggtataagtcacagcacatatttcagttcattataagctagttatcccagccaagctaagaaatatgtatgctttaaaagatgtatgaaagcatcaaaagagggatacttcagaatttttattccaactcttaacaaattataaaaacaatatattttattgcttaaagatattcaggcaaaataagtattatactgaagtacaattaatttgtaaaaaataatgggaaaatgaagtcacattttttcttgatgtccacataattcatagctttttttaaatgtgagaattgttttttttgaaaaagtttttattcctaatctttaaaatagagattctctagtattttgagactgcttttttttttatcatcagctctaccattgtcctcttttttttttcaatctaatttggccattttagttaccccagtatcttcgtctgaaataatgaggtaaccttttagtttttagtggaaattatgaatggtttggtagttgactttaattctaacacatgtcctactttttttttctttagggattggggaatttttctgtaaacacttctaagggcaatacagccaaaaatggtggcttgcttctgtaagtatacaattggatgtgctaaattgaacaaaataggttcttgtgctattttacttaggtttctctttttttccccacacatagcagtaccaatatgaagtgggtacagttttcaaacctacacgttgatgttccaaaggatttgaccaaacctgtggtatgtactccctgtttcttggtataaggagctaccttggcaataggttttccttattatttcattgggttttttttccccaaacactctatgaataaaaaaattttgtcctagaatactggcaaatgcacaacgcatatattctcttaactccctggattatattgtcttcagggtatcaaagtaagttctaaaggaataaattatttacccccaaataactgtgttaattagtagtctcttgcttttagcttggcataatggaagagttgtcagaatttgtgatgtagaatacttgatttatgttatggaaaagtatttttcttgtagccttcaagtctttgttttcattttgtgtattgagcctgggcctggacagtgctttattgttcacagtgagaaaatgcgttagcacaaataataaacatctagaaggaacttggtaaccctgtagaagctatgatttcatcaatccagttttttgtgttacttgtaatttttaaaaatcctttcatttccacccctcaaaaataaccccctttaacagtttgggattacagttctagacatttgtctgtaggtactcactttgtctgtgcacatgtctagtttactgctcttttctaacttttctcttaatagatattggatatttatttatttatttattttgagacagagtctcgctctgtcacccaggctggagtgcagtggcatgatctcggctcacctcacctcagcctcctgggttcaagtagttctcatgccttagcctcccgactagctgggattacaggcacacaccaccatgcctggctaatttttgtattcttagtagaaatggggttttcccatgttggccaggctggtctcaaattcctggcctcaagtgatctgcctgcctcagcctcccaaagtgctgggattacaggcatgagccaccacacctggccagtactggatgtatttctatgatagtacatttaagccccagtctgcaactcacatgcctgcaggagccaggcctataagaaaaggtggcagaattggcatggtgtgccactgtctttataagcaagacagcagctacttattctagccacttgttgccctgtgggaaatcagacctagtgatgccagcctgtctaaatcttccaagctaaactgaaatccagattttcttgtgaaatcttctgatttttaatattcctaacaaattcaaagtatcttttaacaccctgtagggatcagtcagaacacatcttgaggctatattcccccttctcatccctcaacttaggacacaggctatcagtatattctgttcttccaacaaccctttttggagtaattgagagtggatatctagctttctggctagtaagtaaatctttcaggagtgaagtgatttaactctgaatcattggattagtagtataatttactggtttaacggatgaatgaaatgaaggtaattcaccttttggaagaaagtcaaaaatgtcaaacccattatttctaaggtctttaggtattagggtggaagaggttgaagttataggtatagtcagtgtcatatcatttaaattagaaatgagtaatttgtttattagggcagacaaaacatacgcgaataaaacctaataaaaaatatgaatagaactaacttggctttgtataataatgttttataattaataagcactttaatctgtgttttcttatttttttcttagagaaatactatgagcaatagcataggtttaccctctttcatatgtgaggaaactaatgtgcagtgagacgatatgatttgtccgttgtcattcagctaccattagcagagcttaatcctcaatccaagtcttctgcccaggctctttactagcagaccctggagtcctttttcattgtgaatttgaagctgaatcgttattttaagttggaaagttcctttagtaattttgtgggttgccttgaaaattcttttcatttacactgtattttaacagattctgaggctcatagtccagatctgaacatgaaagtatctagacacttcagctaacactgccgtcactcagtgtttttctcctcatttattagtaaactctgaagttgttcaattgaggctaatgttttaaatttgctagttagaaatagaagaggaactaaaactgaaacttttcttttggattttaggtaacaatctctgatgaaccagacatattatataagcgcctctcggttttggtgaaaggtcacgataaggctgtattggacagttatgaatattttgctgtgcttgctgctaaagaacttggtatctctattaaagtgtgagtatggcctttcctgacccgacctgttcgctgctgtaatatgatcaaccaggaaaatagtgctcatcccaggaaggtctgaactcttttttttttttttttttgagacagagtctcgctctgttgcccaggctggagtacagtggcacaacctcagctcactgcaacctctgcctcctgggttcaagcagttctcagcctcccgaatagctgggactacaggcgcatgccaccacgcctggctaattttttgtattttagtagagatggggtttcactgtgttgcccaggctggtctcgaactcctgagctcaggcaaattgcccgcctcagcttcccaaagtgctgggattacaggcgtgagccactgcacctggcccagtctgagctcttaaagtgggatagaaactcttggtgggtagagcttaagtttgtcatatgttatcctaatcaggatcatgccttcctgccatgtttctgggatctccatggagcagggaggtagagtaggtgaatgaacaatcgttttagaccctttggatgtgatgatttttggctaatacatccatcatttcaaatcttccctaagaaacaccacttacccagtaatttcttgcttgaacaaggtaagccttggagtcactgcagggtcaagcataactgtctcctttgtcttgtcatctgctccttctgctgttgaacgaggccccatctggggctttggcagtctggccttctgacaaaaacagaaggccacggtttcccaaaacagactatagttttgttattttgatttatctgtagattttcctaaaacaacagacatacagcaggtgttacaactatgtctaccacactggtgctgctcttcacaattaatatatttggtcaataaaagactaaagggtgtaaaagcagcaggtgtgtgtgtatgcttgcacacttgacatgccagggcttatttttgagcctgtgggaaaaagtttctattgctgtctgcagtgtttattttggcttgagttttatgatagcagttgttgttccagatgacagttttggcaaatggaagtctgtaaatggtagttaatgcctataattgagtgtgagtctgacctacaaaattatggaattatgctttgttatcatagtgactcaggttttgttttgtccattaatttcagacatgaacctccaaggaaaatagagcgatttactcttctccaatcagtgcatatttacaagaagcacagagttcagtatgaaatgagaacactttacagatgtttagaggtgagtgtatttgagaaattctggcatttttgaaataccaaaaattcacactagcatataactttactttaacattgactagattgacttctttcagcaagcccatgtctgttggttgtacagaaggtaaatatcttttagtgtttatggaagtgtcatggtaggaaaagtaaatgcaaataaagcaatcctttagagtagtgcataccttaactcaggaatgcagattatgcaaagatagcattggaataattttgctcatatttcaaaaattctagtgaagtttttacacagttctaataactgtttcacatactagctggattttccatgtcagtgatgcacagcattaggtttttcattcatctgttactcatttgtgcttccattagtgccagcacagtcgtgtgcttaaggagagcataggttctggagtcagactgccaatgccagaatccaggtcctgtctcttaacagctgtgtgacatgtacctctattccttcatctataaaatgggaataatagtggtacccatctcataaggttagtgtgaggattagaatggaaaatttatgtaagcactcagaatactttgatcacatagtaagtgattggtaaatattaaaacaagcacttatgtatcttttatatgggaagtactgtactagtcattgagggcacaaatataataaagtcatggtccctactcttttttttttttttttttttttttttttttgagatagagtctcactctgtcaccacctaggctggagtgcagtggcacaatctaggctcactgtaacctctgccttccgggttcaagcaattctgtctcagcctcgctagtagctgggactacaggtgtacgccaccgcgcctggctaatttttgtatttttagtagagatggggttttaccatattggtcaggctggtcttgaactcctgacctcaggtgctccacccacctcggcctcccaaagtgctgggattacaggtgtgagccactgtgcctgcgcagtccctactcttaaaaagaaaaacccaaattttatccatctttgtctgagggaaacgtctctcatagtacacacagaaaatcttatattaactatatcttataatttagtccttttgtcttcagttgttttgtgagcctgggattttatgttagattctttaggggaggccaggtgcggtagctcatgcctgtaatcctagcactttgggaggccaaggcaggcggatcacttgaggtcaggagtttgaggccagcctggccaacatgatgaaaccccgtctctactaaaaatacaaaaaaaattagctggacatggtggcacacacctgtagtcccagccactcgggggactgaagcaggagatggcttgaacccaggaggcagaggttgcagtgagctgagattgcacacactccagcccaggcaacagagtgagactccatctcaaaaaaaaaaacaaaaaaccgtgctttaacaaacagcttacatgaaacattttcatgtttgatgttttagttagaacatctaactggaagcacagcagatgtctacttggaatatattcagcgaaacttacctgaaggggttgccatggaagtaacaaaggtatagcttgaatttctgcctctttcggtggggcggtggggagtggtatctgtattgttgttttgatacattgcagcctggtcctggcccactgagtagagtttgccctaaactgtggcaaactgggagacacagttgccacagcggttgggggctacccaccccttgcaacagaatcctgccatttcagcccaagtcctccgtgaaccacctatgaagttctccctcctcaatatgagttgtctagacctggggatcccattaagtggcaatccatgaagatcattgaggatcaaatcgattatgtatgtgagagtgttttatagaccatcaagtttccttctttccatttcaaaaccctatagaaagactagggggataaaagaaaaagaagtaaagaggatttgaccaaattaataagtccgatttgtagtcaaagagttctgttaaatccacattatagttttgtttctttctttttttagacacaattagaacagttaccagaacacatcaaggagccaatctgggaaacactatcagaagaaaaagaagaaagcaagtcataaagcctcagggaggccatttttgcctaaatttgaaatgagggtgggccagatgagtatgtttaagtggagagtgcttccagctgagatgatttgagtctgccctaactgctccattgagttctcgtgccctcatcagctgagggcagggaatggaactttaatggaagaaccacttttatctattctttttattcattgtttcagttctgatttcagcaaacatgagcaaaccactttgactgaaagcagaaagagtgaaaattctattttgttacgctactggtgttcaattattagtttgtaccatttttaatttatgtcagttgatgcatctgaaaataagtgcttggagtgttcgtacccttatttttttttaagattcctagaaggaatctttggttaattcagattgagcagttaaagtttttgctatttacctttgtgcaggctggcatatgctaatttgggggtggtaaccaaccgattttatctcatgtaagcattacattttgaagactgaatatacttcacagcagatcaaacacatttatggcatgcactgacctcttcttggagcccagaactttatagagttgcctaccagggttactgtaatggaatttatgatcttaagaaattactagttgtattatttatcctatgattcattcattcaataagcttttactgcataaactttacatccagcactgtagttaagtacccaaaattgaatagaaataatggcttttgaaaatcgcacaaagcaggccaggcacggtggctcacgcctgtaatcccagcattttgggaggccgaggcaggcggatcacgaggtcaagagatccagaccatcctggctaacacggtgaaaccccgtctctaataaaaatacaaaaattagctggacatggtggcacgtgcctgtaatcccagctactcaggaggctgaggcaggagaattgcgtgaacccgggcccggtggaggctgcagtgagacgagatcgcgccactgcactccagcctggcgacagagcgagacgccgtctcaaaaaaaaaaaaagaaaattgtgcaaagcataggtaaatatttttctttattaagcttctcactgagaagccctctttattttggtaaatgtcactctgtttgttaggagatgtctgcttttccatgaaatgaaatagtggctaaagccctgaaagaggcaagactacaatgggctgaaacagttggtatagcaaccccagagaagtgcttcattttctttttatagtagaagcaggtccatgtcttttgtggtttcctgcacatctttggagtagttatgacttctcagtttttccccccttaaactgcattgcctattcttttttcctgacatgctatcaggtatcagtgtgttgaatacatactgcttgtgtatcagacttacgttactgtcatcaccattaaaagaattgcagctttgtgccccatgaccttcagctcagttgttgactgtcattcatgaatgcctaaagcatactgacaccaggtataagtacttgaagatcaagaactagtcaataaaacatgagcaacataatggtaactat

SEQ ID NO: 232 - DNA, 191 bp, Homo sapiens
aagcaattctcgtgcctcagcctcctgagtagctgggactacaggcacacaacgatgacaccccactaattttttgtatttttagtagagatggggtttcaccatgttggccaggctggtctcgaactcctgacctcaggtgatccgcccacctcagcctcccaaagtgctgggattacaggcgtgagcca

SEQ ID NO: 233 - DNA, 100 bp, Homo sapiens
ggtggatcacctgaggtcaggagttcgagaccagcctggccaacatggtaaaaccccatctctattaaaaacacaaaaattagctggtcatggtggtggg

SEQ ID NO: 234 - DNA, 1169 bp, Homo sapiens
tgaatctcaattatctgttcacaagtaattccttaactaaaaaacagtagatattgaacgagaaggtcatgtttaaatccttccattaatttctacatttctgatcatttgcttttggggatttttttaaagcagagtataattcagtggaagtgtgtctttgtccccagaggtttctgcatgtgcaagcattttaatctagactgccagaacccccaggctttttagtgaagtttgcagaggaagacttatctgtattgacttatatgttgcacagaacaaatgaaagtctcagacagtccttttttacccaacaaaggcttatttttttccatcctttgcttgggctcaagactcctgccctgcgtgcctccactttaaacatgatcagaactgtgcttcattgcaaataacaactgaccaacaatgggccctgcttcatagatttgggaatgtttggcttaagctgccaatgactgaaggcctttaattcccaccggccagtcacagtctgctttgttgttgtctgttgatgtgtctgtgctcattattccttgacatgcaacatcccccctccaccctccaaccatccacaaccgcacagaaagcaagattcaaatgggaacagctgtagtggttcaatgggaaatgatgcctcttgtgcaaaggggagggagacagaaaagggagagggcctatttgaaaaaggcaacagctttcagaaagtctcctttaagaaatctacttttgaatatacttcagtgaaatcattgttgaaataggctgacaatggaaatctgcccagattgaaaatgccagtcctaattcaaaaaacaattcctagctaatcgcttgttgcatttttaaattatttctagactttgagctttagaattaaatggctaactgggaaatgttaccattttgtatatatgttgtgggtataaatgggcacagatctacaccctgctgtaagtggaatttttttctaacacgtttttgatttatggtatctataaggattattttttaaggatcatcaggatgtaaaacagagtgtgtgtgaaagtaaccattggtttagaatgttgatctaacatggaaataaaatttgtaacaccacactataaggttaaaaagaaaactgtataataaaggaaatacaaagg

SEQ ID NO: 235 - DNA, 309 bp, Homo sapiens
aagtacttacactttgaactttaaaaccgagcagttgagtcattcagtaccaagccaaaacacagaaaaacaaaaaagcagatgaggtttattcttgagaaatgaaaaagagaagaatatatatttcgccttggtgagccaaacatacagagaagaaaaggctttttaaaatcttactagtatgagaggcccagagtaaaaagaaataagcaaaagaatatagacacaatcctaagatgacattcacagaacaaagctgaatcttcaaataatactgtatgagtgaatcttaggaaacctagtgatgat

SEQ ID NO: 236 - DNA, 1088 bp, Homo sapiens
tttaaaactcttgcaagcacttttaattgattaggaatgaactctagatgcacaaaatgattggaccgtgaacagtaatacaactatatctaagaacaattaacttttgctggccaaaaaagaaacgtatgattgcatgaaaatgtgtataaaacatctatattcttgtcaaatataaatgaaattaactttattatagaaatcattctgaggatttctagggaagacaaatacttacattttgacataaaacaaattggattatatcgaagacacactctaccttttagctatcaactttttttcttccttgaatttatatcttacccttttttgcacataaacttcatctgttaacaacctttggaaaaccaacagatatttctgacataaatctagtgcatgttgttccaggtttaattatatgcaaaggaatgatacaaacttggaacatcagtccataaactatgaacagatgggtagaagtattcgatatatcttgataaaactcttaaattcgtggcaaagcttgttgatcatggttttctttttaaaaaaaaaaaaaacaacttcatgaccaacacagatcaaacatccatccagtctacattgttctttttttcattataacatacaaatgcccatttacaaataatacaccaaaatgaataaaagtttggataccaaaatgaagatttgttccaactgatatcgtgccttctgtatacaaaggtccttgtttcaagtccattccttccccagtggtacaatacaggacacaattgtagaactgaagcggctctaacagccatttttctttctttcctgaaagctcaactgttgtgtccccatagtcactgactgaattaacacaatatttcctttcctttttttttttttttttttttttactgtaatcttggccagtattgagacatatcaggttcacttccgggaacttgaactggaactgacacaccaggggaaatgagtcctagaagtggatgaaagaaatagccatgtagatattccctttgagaaacagacatggaatacaaatttataggtttacaaaaaaaaaaaaaaaa

SEQ ID NO: 237 - DNA, 357 bp, Homo sapiens
gttattgaaaagtcatattctcatctaaatctactacactgtcattttatattcaatttaaattccctcttcccccccagcaggaattaaaaggagtttcctttctttgctcgttcgccctctggttagctgctgcttctgacttttccagagctggggcaaagggaagcaatgtaaagaaaattgaagggtcttacttaactgtaggtgctgttgtaatcttgctgtatgtctccatggcagctgcccaaatgatgacttgtcctctggggccatgatgagcaagggcctgctcacttagagatgggagataggggtgtcataacaccacagtgttccatcaggttaacaattatt

SEQ ID NO: 238 - DNA, 2100 bp, Homo sapiens
ggaacctatcactgcatatttagatataagaattcatacagtattgcaaccaaagacgtcattgttcacccgctgcctctaaagctgaacatcatggttgatcctttggaagctactgtttcatgcagtggttcccatcacatcaagtgctgcatagaggaggatggagactacaaagttactttccatatgggttcctcatcccttcctgctggtaagatgctgattgctgaattgttagggtatattatttcacatatgtggagtctaaaaatttagtcttaaaatagggatcaagagacataggattgtatcagagatagaattaacagagtagaatcccatgaatctttgttaccttctattttgctatgtggctagtggttcattggtttatggtaccatcttgggagtttgcaatggtggagcctttttttttaattgggagaagttgaagaaagtattgagataccttctaaggaatatggcagactagatattctgacaatcttttcctccatgctataaagttgcatgccacaaaactgccatgaaaatccctttaaatgcataattgagcatgtaagaaagtatgagaaacaaccaagtgccaaaaaagtagaggaaaataaaatagaaatgatgctttaactaatgctggagctttcctatgggcttttgccaatatcagaaacccagaaccttgggttttaaggctccagagggcataaaagtaaagactgtgctccctaaacacacaatgggtcactcacaccccattgacacaatgttaagaccttcaaaaagtggcacattcagtgagactaagctaggaaaacaaaattcatctgccagagttgagaccttggcctcatctctgggtggacaaaaggtttcccccaaaaaatatagttgtcctgccatcactcaggtttgggctttgaatttatatttcctttgtggttcaggagtgccaacctaagtttaaagttgtccattggtagcaccctatgtcaaccagcaaaaaaagaaaaaaaaatcaaagtctctctggtagatggtgcccttaatccagatccctagggattcctagagattaaggtcaaccagcatgatctcacaacccaaaatctcaaaacacagacaacttcatgagggatttacaagctcattcattctttcaataactattctggagggtttactcaacgcaagacaccatagtaggcaatgaaagggagaaaaaagaagtggggcacatattttaatatctagaagggcccatgccctgaaaggcaatgcatataatataaaatatccaaatagaataatacagactaaaaaaacagtagaagttcagaaaagtggggactcaataaacactgtagtctttaaagaaggctgcatggcagagggatataatcaatctggattttgacatatgcagcatttcaacattctgtgtttaatatgcatacattcagtgctttctatgcaccagatactgagctgagcaccaggagatggaaagataaataagacaaggtactttctctccaggagcgtatggtctagtagagaagacaaactcatgaataggtgactatataccaatatggtaaaggcagaataggataaatgctcagagcatgatgaaatttagatagggagaaggatttgtggaatgctgaaaaggcattctgaatgtcaaaaatgtgtgacttggagtcatgaatggtagaggagaagttttgactagcacacatgcaaatgtgggcttacatacttcaaaacccagaggtaaaacctgttaaaaatgaatgtggcacattcctcgggaaagcttggacaggtttattcatattaggttatcttaacacaattgtgcattagagactcatgtcgtgactaattcttcaaataattctttcttcagcaaaagaagttaacaaaaaacaagtgtgctacaaacacaatttcaatgcaagctcagtttcctggtgttcaaaaactgttgatgtgtgttgtcactttaccaatgctgctaataattcagtttggagcccatctatgaagctgaatctggttcctggtaagaac

SEQ ID NO: 239 - DNA, 532 bp, Homo sapiens
gtcaggttcggggtgggcctttcgggaaatcacacactttcaggatgcagctcgccttcggggatgctcctgggcctggggtagctggtttggcctctggggctgaccctagggcctggtgagcgagggggtaacaagagatgtcaggaaagcgccatccctgagaccaggtctccccgtttctgtagcatgatggggcccagcttgcagaaggtggtggggacagggcctgcttcctgtgccagtgttccacttgggagggcagggggcttccaagtgggctggcttccaactcagggacagtcctaagaggggggcagagtctcggtgtaggggccccctaggaggactctcctggcatccagtgggtggagaaatcttgcttacactgctgtctgagcacatggggttcctgactctagggacagtttcctggtccctctgctcttgccagttagggtttgtatttgtgtgcagcggccagggagagtgtgtgtggtcgtggcgtccgtggtgggtgcatcttttctct

SEQ ID NO: 240 - DNA, 5786 bp, Homo sapiens
tgccctgcccccgtcacaggtacatgtactgggcagattggggtgagacgccctggatcgagcaggtggggatggacgacagcacccagaagatcattgtggacttggacatttactggcccaatagactgaccatcgacctgggggagaagaagctctactgggctgacactaagctcggcttcatccaccgtgccaacctggacggctcgttccggtaggtacccgcccagtcccggggcacccccttcccctttgcccccaggtgtccccagtgcttttgaaggcgttccttcttaactcaggccaacagactcttctctgaaactctggggacctgagaaatgcatgacttctcagaacttgaaacagtgtcaggggctgggtgacacttgccccagcacctgtatatttctatagcaaatgtggcatgttcattctaagtagggcagaaaagactgtctgtagcccatacctatgcacagttgttgttttctttttcattattttgtttttttgaggcagagtctcactgtttcactcaggctggagtgcaatggcatcgtctcagctcactgcagccttcacctcccaggctcaagcgattctcccacctcagcctcccaagtagctggaactacaggagtgcaccaccacacccagctaatgttcgtatttttggtagagatgggggtctcacatgttgctcaggctggtcacaaaactcctaaactcaagcgatcctccccctcggatcccagagtgctgggattgcaggcgtgagccactgcccccggcccatgcaccaaatgaggttttatcgccaaatgagcaacaaaagctttccgtctccagagtgtcttggattttggaattgttggggagggcttgtggcccgagggggttgtgaacaataaccctgtcacaccaccacccccaccctggccctaccccagctcaggcatcctgagggcagcagccggaagctgtctcagttattgctgcattccccagtctcaccagggggccttccacatagtcctcaataaagtgggccaaatgaatgagtaggaaggttttccccttggtgggtaattgcttttagagccttctggtcagcatagcttcacagccccatacttaattacaccttagaaaaacatcccctccatgtacaggtgaagggcaatttattcactgaccaagtactgcctgctgctggctctgtgccaggtgtcagggatcctcctgggatggcacaccccattcctgcactagtggagctcctggcctaggcagggggtgtggcgggtgtcgatgcaaagagcagtagtgactgcatgggaggacccagtggctggatttctgcaaacacaggccaacacccacatgaacagacttgagggcctgggcagctttgctctgtgctcgccaggcctcatgtgttagttatccattgctgtgtaacaaaacagcccacaacttagcagcctgaaacagcaaacaggttttttacggggggggagggggtcagcaatgaggagtggattagctgggtggttctggctcagggtgtgatctgaggacacattcaagctcctggctggggccttagtcatctgaacgtttgagtgaggctgggagatccacttccaagctcattctcatggcaagaggcctcggtttctcctgttcctcttatgctgagccacacatctcttttgggctggtttgaaaatatcccgttgtcctggaagtgcagactggctgggtctggtttgagatttggaaatgtggctaccctgtagactgtggttcttgggagctgaatgatcttacagttatgaagggtggattagaggatagaaaggctgcagctgggagtgccctggtcaaaggatggtaacaggagacagtgagggtgatggcaattgaaacatgctaatggtggtggcgcagcaatttactgttttccagggacatttatcagttcatttaatgctcacaccagctctatgaaatgtttgctgttatgttatatttatatttttttgaggcagggtctcactttgtcaccgaggcgggactgcattggcatgatcttagttcactgcagctgtgacctctttttttgtttggttggttttgtttgagatgcagtcttgctctgtcctgcaggctggagtacagtggcacaatctcagctcaccacaacctccacctcctgggttccagcgattctcctgcctcagcctcccaagtagctgggattacaggatttttgtatttttttagtagagacggggtttcaccatgttggccaggctggtctcgaactcctgacctcaagtgatcctcccacctcaacctcccaaagtgctgggattacgggcatgagccaccaggcctggccgcagccttgacttcttaggctcaagtggtcctcccacctcagcctcctaagtagctgagaccacaggcatgcaccaccaagcgtggctaatttttttggtatttttttgtagagatggggtttcaccatgttgcccaggctggcctcaaactccttagctcaagccatgtatccgctttggcctctcaaagcactgggattacaggtgcgagccactgcacccggcctgtgtttgctattatgatgccctgtgcacagagaggcaggcatgtgaatttgcccaaagccacacagcgagtcacagccagggttggaatgtagggtctctagccccagggtctgttctcagcttctctcctacctgcctccccctgggattcttctgcctctgcagcagccatttctcttcatgaatgcacccagggctactcacgtggaaccatcatgtgcggggggacaagctctgaagccgcacagacttgtgtaggcccctttatctgtgactgtggctcgggcaagggccaaggctgaccttcccttagtgcttctggttgaggcagagcatggcccggaaagcaaccgggagtgatgggcctctggcttttctcatcaaaaaatggcaacatggccaggcacagtggttcacacctataatcccaggctttggaaggctgaggtgagaggatcatatgagcccaggagttcaagaccaacctggcaacaaagtgagagcccatctactaaaaataaaaattgggccgggtgcagtggcttatgcctgtaatcccagcagtttgagaggctgaggtgggtggatcacctgagggtcaggagttcaagacaagcctggccaacatggtgaaaccctgctgctactaaaaatacaaaaattagctgggtgtggtggtgggcacctgtaatcccagctactcaggaggttgaggcaggagaactgcttgaacctgggagatgaagattgcagtgagctgaggtcgcaccattgcactccagcctgggtgacaagagcaaaactccatctcaaaaaaataaataaataaaaaattaaaattaaaaaattagctggccatggtggtgcacacctgtgttcccagctactcaggaggctgaggcaggaggattgattgagcttaggtgatcaaggctgcagtgagccgtgatcatgccactgcactccagcctgggtgacagagcaagaccctgtctcagaaaacaaacaaacagacaaaaaaggcaacattgtggaaaacagtttggtgattccttaggatgtaaacattgatttacgtatgacccagcaattccgctcctaactatatactgtaagaattgaaacaggtattcacacaaaatgtgaacggacaggaatgtctatagcagcactgtgcacaacagccgaaggtggaaacgacccagaggttcccagcaggtgaatggatgcacagactgttctatctgtgcattggaatatggttcacccctagaacagaatgaagcactaacacgtacagcatggatgaacctcaaaaaacatggtgctgagtcaaagaagccagacatcaaaggctgcatgttgtgattccatttatgtgaaatgtttagaatgtgttagacagagctgtcgaaagcagatcagtgtttgccggcgctgggggtgtgggccggggagtgactgttggtgggcgtggggttttcctgtggggcaatggaagggctttggaactagacagaagtggaggttgcacagccttgcaaatgtgctagatagctctgaattactcactttaaagtggtaaacttacgctgggcacggtggctcatgcctgtaatcccagcactttgggaggccgaggcgggtggatcgcctgagctcaggagttcgagaccagcctgggcaacatggtgaaaccccgtctctaccaaaaaatacccaccaaaaattagctgggcatagtggtgcatgcctgtggtcccagctgctctggaggctgaggtgggagaatcagttgaacctgggaggcagagagcagggagctgagatcaccccactgtactccaacctgggtgacagactgagaccctatctcaaaaaaaaaaaaaaaaaaaaaacagcgataaatgttatgtcctgtgaattttacttcaataattttcttaaaaacagcatcaacaaaaacgaacaaaagaggtggtggatctgcagagcacaagcccacagcttccatctcccctgtgccacttcatgagcgtcaccttctcctggcagctgtgctgagggctggggatgtggcagggaccatctgcccccaggcccaccctcagggagcctgtcacggggagagggtcattaagcaaataaaactacacattactgaccatgtcacattacgatcctgttaccagtgtccataatctcattatacccgagtcctcctttgctgggcactgtaggcacctagaaaagaatagctgtttctcgtgttgatgccacgtttaatttactctgaaaatataaattatgagcattgtaagaaggagcaagtgcacgtggcctgatttgtattcagaggtttaagccttgggcaggagaggtgtccttttcaccaggtggggcttcctcctttcttccctgggggagactttgccacttgacctgggggactccatgtgtcactgtcacagactgggtttgggaggcgccctgtgcacgccaggagagatgtacgagggcgccaactcctggggctcttgacctggcctcacttgtctggttgaaagtaaatgggaggccgggagtggtggcacatgcctgtaatcccagcactttgagaggctgaggcaggcggatcacctgaggtcaggagtttgagaccagcctggccaacatgatgaaacactgtctctactaaaaatacaaaaatcagctgggcatggtggtgggcatctgtaatcccagctactcgggaggctgaggcaagagaattgcttgaacccgggaggtggagcttgcagtgagctgagattgcattactgcactccagcctgggcgacagaccaagactccatctcaaaaaaaaaaaaagaaagtaaatgcgtcagcagcaatgactgttgggggaccctcctgatggctctctaccccgcctccctgactgcaggcagaaggtggtgaagggcagcctgacgcaccccttcaccctgacactctccggggacactctgcactggatggactggctgacgtgctccatccatgcctgcaacaggaacactgcggggaagaggaacgagatcttgagcgccctctactcagcatggatatccaggtgctgagccaggagcagcagcctttctg

SEQ ID NO: 241 - DNA, 517 bp, Homo sapiens
ggaaacttggagcctcctgaagggcatacagccctgctgacacctaagcctggtgagacccacattggacttgtgaccctcagaactgtcagacagtgaaatcacgtcgttctaaaccagtcagctgagtggtcacggcggcagtagatgagtgcacctcccctttccaaccttctaaacctcaggtgttgccttctccactaggccaagcgatgctccaggaaacctcaggtcacagccagatgctccaccctccatcagtttctcatgtgtccttgaaaagtcataaaaaatgttgaccagaatgtcagcacagacagtagaggtgggagtgtttctttggagtgggtgccgctgcctggttgtttgggccatgcacagaaggcttgtggcaggagcctagggtgtccatttagccttctctgttgtgttggcttccatagggtcactgcctcctcgcctgtgctctctatgtgaacacagagtttctgcttcactgtgggatgaggaggcttca

SEQ ID NO: 242 - DNA, 3952 bp, Homo sapiens
gcagacctggcctcatgctggatccatcgcggagccgctgtgtgtgtgagtgctggcagggatggggtgggggtggacagtgggagacaagatgggacacttcaggtccacaggccaggcccagggcagcaattttccccagacctgatcacgccatgctcagggcctgtgtcggctattcaacctggagttgggcccaatgtgaaaaacctgatcagcccatcctgctggaacagagatggttactacttcactttttacactaggcattttttccgggcctttgcagtttggaattcgtcttttctatttcttattttttttcctttctaatcatttctgttccatgtgtagcctcgttttctttggtggcgggaggtggtgggggtggcctctgctctgatgtctggctgagccttggctgctgagtgacctttccagaagggctgtccatagcattcatggagctgctgcccgacccgagggcctttccacaatcctgtggccccttgtggttctgaagtttctccttatctgtgaacacatagtgggcattagcattgtgtccaggtatgtacatgcatgtatgccaggcagccctgtttccagagacctctgtggtttccagggtgagaggcccaggctggcagcagcccccaatggcagaactgacaccacagcccagatagggctttccctgggccgggaggcctgaccagagctgaataaaaccagtcccaactggcctctgggaggcagcagccgaggttggatgggccacgcccagctcagcagagctccctgcaaccggccaagccctcagtctgcaaactttctggtactgggtttgggagggccatgggattggacaagactccagtgccacccagaggctgaacccagtggctctagggagagaagacagcaagagctataggaggggggtgcccagagagtgaggggcccagagtggggagaacatgtcagaccgctctcaagaaaccttcatggtggcagtggcaggtgatcaaggccttgagaggcttacacccttccttctactccacatcacttaagatccctttaccagagaggtgtgtttgacatccaaggtgacttatttattagtcccagaaagagacccttaatacagggaagcagagatggctctcgagtgtccttttttccctctctgtccctggtgttactccctccagcctcctacagtgattcacctccctgtaagtgggaggggtggcacgaagtttctcttccctttgtttctgagttctgcctccttccctccctgccgcctgaccaggtccagtggggcagtctacagggctgccccagcctcctgatattcccacctgggtcatctccaccctggggttcaaagggacagagcccttccttacagtgtcccaatggaagtggctgctagaagcagagtttgcacctggagatccagggctcacagacggctgatgatttacctgtggcgggcacatgacctttaacaagccactctcacacacctcactctatttaatctccacgacaataccacgaagaaagtttattaatcgggagtctttggattgcaagtgacagaaaccaaactcaaactgccttaagcaaaaaagaattcgctggggctgggccccgtgcctctcacctgtaatccaagcactttgggaggctgaggcaggtggaccacttgagttcaggagtttaaaaccagcctaggcaacatggtgagaccctgtctttacaaaaaattaaaaattagccaggcgtggtggtgcacacctgtagtcccagctacttgagaggctgaagtggaaggatggcttgagccccagaggcaaaggttgcagtgagccgagatcgtgccactatactgcagcctgggcaatagacaagactcttctcaagaaaaaccaaaagcattggttcacacaactaggaagtgcagacgtggtatggcctcaggctggctgacctaggcagccacagtgtctgcagggcatgtcctgctctttcctctgtgtgagtttcatggttccttcaaaggtggtcaccagatgctctaggcctacaccctctcagccttgcaaactcaataaaaaatgagccccttttccccaataacccaggaataatagtctcaaagctgattatcattgggcctccttggttaagtgcccatccctgacccaatcactgtaaccaggggtatggaccacaagccttcagccagaaaggcgtcagcctccactccagtcatatggaccaagggtgggaaagggtggttcctgtaggagaaccagagtgatgatacgagaatatggtgcatagactctgggcaggcagaaatacaggtgtcccctgcgatggaatcatcattctcatcttcattttacacgtgaagaagctaaggcccagggaggtctgtagttcatggtggagcagggatttgaacttggtctgctgcgtcctgggcctgaccagcacttccccagaatcattcattcctaaactttgattgatgtcctcttcagcccactctcctcctcttagaatccagtcagccctctacggattccagactcttccaacctggcatggcctcctcgtcttccattgagataacatacagaaactattctttaatatttattttcaaagtacaagaaaggagataagggtggtggcattgctatgacctaagcccagcatagctcaaactcacagtgaccctcagtattttgattggctggttgattctgtgtttgattggttcattgacctagccatccacgcatagcttcaacaagcattactaagcatttgcatgcaccaggcactatgggaggtgcctgggtgacagagatgacccaagatagggtccctgtcctccgagctccccatccggccttagctccttaccttgcctcatcttcccagggaggctgtggtcctcaggacatactgctgcccgctcaaccctagggacacgtggggccttcagtaaacacttctaaactcggcactggagacaagcagctgcatcctcattccctgctctcaggttctccacatgcaggtggggagtcacgagtctcatcaagcacacaacatgggcaggtgctgaaacattccactacgcctcttcctcctaaagttcttgtgagcatttgcagggctccaaacttcccaactgagatatgggccaggccagtctgagtgcatgtggccagccacacctccatccactgccctcccagctgcgcattcccctcccactggccacctgcccacctccacgtgctgtgtctgttgcagcggacaaggcaatctccatgctgcagggactgtgctaccggtcgctggggcccggcacctgcaccctgcctttggcccagcggatcaccaagcagatatgctgctgcagccgcgtgggcaaagcatggggcagcgagtgtgagaaatgccctctgcctggcacaggtaacctcctgttcccatcccagctttcactgcccaggggctcaaggccagtgaccatgttgccaggcctgggtagacttccctcaatctggaagactgaagtagccttccctgcctgctcacgtgcttatcccaacctggggctccctccctccttgctgccacaattgccgtgtctcccaaagggagggaaaggaaggccctggtttcctgcaggaacagcacctctcagtttgtcctctggctgttggctttgcagaggccttcagagagatctgccctgccggccacggctacacctacgcgagctccgacatccgcctgtccatgaggaaagccgaggaggaggaactggcaaggcccccaagggagcaagggcagaggagcagcggggcactgcccgggccagcagagaggcagcccctccgggtcgtcacgg

SEQ ID NO: 243 - DNA, 7441 bp, Homo sapiens
gggtacaagagactgaacctcactcactgccaaggtaggacccccagggccagggctgggctcaaggatgccggggcacactcccagcaccagacaggaggggtgtctgtcactggccgagtggtctccactgagtccctctaagccccagctttggggagtggtggggggctgctgattccaggggactaaggaaatccagggacttgcttgagagtgacagaggaagccaagggggccgacacctcccctcgtccccatctccacccacacccacctggaacacaggctaggggctctaggctatgtggggctgtgtctgaaggggccaccccagtctgtgcacttccacttttctcctgagctggtctccctggagtgggaagaatttcagctctagggtgggaaatcaagtcagcctgagttgttggggcctctgtgggcttttcccaactgaaaacctttagctactcaggcttccctcccgcttgcttcaacccatagccaggaaaggggacggggagcacgggggcttcctgcctgggacaggctcctggggctggcagaggccagtggggaacaaggtggcttccctgtggggagctttgacaactggacaaacagttgtctgtatggtttgctttgggtggagctgggtcagagacaggggattgacccagatggcctccaaggtgccctcctcctggaggttgcttcagagagaggagtctggggaagctctgcatggctgggctgtcttccttgggggtgccaggctgcagaagtgattcctagcccgtggataagcaaaggtgctggggccaagcaaaagggcaggtctctggcccagcctagtccagagtcagactccctcaggagccagtggtttgagggccaagcagacagtggatgtagggagaaatacgtatttttgcctttggagggtacatcggggctgttcatgtctaaacagtcaccagttgcttttcctcctggtatgtttcccaatctggagctttaaggttatactcaggatctcaaatgggctctctgccctccctctactgagccccaagattcaggacaccaaaggaccttccctcaggaggccctgcccctgaaacctccccttcccatgtatgtggctgtggtctctgtgtctgcgaagggacctgctcatctctgcacccgcatgcgtcatctctcctctctctccatccttctctcctacttccacagagtattggaggggaggttactatgggctacatacactgtgctaggagtacacagtgatggagaagacagtcctgccccaagtgcagacagaccccctgaacaatcaggtctaatgagcggggcattcttgagagaaagcagcagtccctgagtgctacaggatcccatggtgggggcgccttcccagactggaaggatcagggaaggctccctggaaaaggtgatacctaaggccaagactttaaaaatgagtacacgttggccaactaagaggatgcaagctctccaggcaatgtgaaccccataagcaaaagaacagtttgtgctgtctggagtgtcccagaaagtactgtgtacgtggcctgtgtacacacgggagatgccacatgtctgccagtgtctcatcagagccacctgtttacccacaggctttggggaaaggtagagggccttggataccatgttagggtttagagcctccctctaagaagtgacagggaacccagaagcagagggaagcaagtcagatttgggtatggaggcccacatcccactgtggccacagtctggatgcatatggatcactgccccttcccatttctcagtagcaccttcccagctcttattggcaccctgccacaatggggcatcctaccaaggagtagtgccccttggtgctcaggctgggtcacctttcagtccctcgttcctgtgcccagtgccaatttccccaaaccggtgggtgacctggctctgcagacacagggctgcctgtgttaccgcctggcctggaggcaggtgcccctcacaagcaattaatgcttatcatctctgctgccatcaccaccatcaatagaagtgccatcatcaagatggcccccgactcctcatatcttagattgtgagggctgagacttccccttggcagggagaagtttgcagcaggaaaagggggtttccccctttgaggtcacagaagaaaccagtgcacctcccttatttgaagaacagcatgagcctccacgggtttccggggggatgcgtgcagcctgcacaaggaagggcgttcaggaggacccgaagatgtgcccttctgaccctcaacctttgcacactcttaactgtgacccctgctgtccccttccccttcagtgccttcctccagcctctgcctccttttccttaccagggtcctccctcctccagctcactgcagacatgctcccagggtcttggggcctgcagaggtgcttcagggacctctggaggaaggctgaataggagggacttggctgccccttctccaccttccaacccacacagtccccctgatctgtttcctgtctgcatctcaacatgccactctccagctgaatgactctgtgcccagtgccaatttccccaaaccagtgggtgacctggctattcctgggacctcagtttcttctcctgtaaaatgaggacatgtgggcctatttgataaaattgtttgtgagaattaaatggggtattatatgttaatacccagcagagtacgtagcatgtaataggtgctcaataaacactagcgcttgaggcctggcaaggcagctcatgcttgtaatctcagcacttcgggaggccaaggcaggcagattgcttgaggcccagagtttgagaccagccatgggcaacatggtgaaaacacatctctacaaaaaatacagtacaaaaattagctggatgtggtggtatgcacctgtcgttccagctactcgggaggctgaggcatgagaattgcttgaacctgggaggcggagactgcagtgagctgagatcacacccctgcactccagcctgggtggcaaaacgagactctgtctcaaaaaatagataaataaataaataaacattagctcttaatattatgatcattgttacatgccacttattggacaaagtggtttgcaatttgatcttatccatttaacaacaccatctggttgttactatcattatcctcattttacaaatgaggaaactgaggcacagggagaggaatcccactgaatacatagcagctcttttgttgttgttttatctggagagagtatttgaagatctctgcccagcccctctgctccatcaggcctccgtggggcgggcacttggtcatctcctccaaccctgcagatatcaacgagtgcttgaccctgggcctgtgcaaggacgcggagtgtgtgaataccaggggcagctacctgtgcacatgcagacctggcctcatgctggatccatcgcggagccgctgtgtgtgtgagtgctggcagggatggagtgggggtggacagtgggagacaagatgggacacttcaggtccacaggccaggcccagggcagcaattttccccagacctgatcacgccatgctcagggcctgtgtcggctattcaacctggagttgggcccaatgtgaaaaacctgatcagcccatcctgctggaacagagatggttactacttcactttttacactaggcattttttccgggcctttgcagtttggaatttgtcttttctatttcttattttttttcctttctaatcatttctgttccatgtgtagcctcgttttctttggtggcgggaggtggtgggggtggcctctgctctgatgtctggctgagccttggctgctgagtgacctttccagaagggctgtccatagcattcatggagctgctgcccgacccgagggcctttccacaatcctgtggccccttgtggttctgaagtttctccttatctgtgaacacatagtgggcattagcattgtgtccaggtatgtacatgcatgtatgccaggcagccctgtttccagagacctctgtggtttccagggtgagaggcccaggctggcagcagcccccaatggcagaactgacaccacagcccagatagggctttccctgggccgggaggcctgaccagagctgaataaaaccagtcccaactggcctctgggaggcagcagccgaggttggatgggccacgcccagctcagcagagctccctgcaacaggccaagccctcagtctgcaaactttctggtactgggtttgggagggccatgggattggacaagactccagtgccacccagaggctgaacccagtggctctagggagagaagacagcaagagctataggaggggggtgcccagagagtgaggggcccagagtggggagaacatgtcagaccgctctcaagaaaccttcatggtggcagtggcaggtgatcaaggccttgagaggcttacacccttccttctactccacatcacttaagatccctttaccagagaggtgtgtttgacatccaaggtgacttatttattagtcccagaaagagacccttaatacagggaagcagagatggctctcgagtgtccttttttccctctctgtccctggtgttactccctccagcctcctacagtgattcacctccctgtaagtgggaggggtggcacgaagtttctcttccctttgtttctgagttctgcctccttccctccctgccgcctgaccaggtccagtggggcagtctacagggctgccccagcctcctgatattcccacctgggtcatctccaccctggggttcaaagggacagagcccttccttacagtgtcccaatggaagtggctgctagaagcagagtttgcacctggagatccagggctcacagacggctgatgatttacctgtggcgggcacatgacctttaacaagccactctcacacacctcactctatttaatctccacgacaataccacgaagaaagtttattaatcgggagtctttggattgcaagtgacagaaaccaaactcaaactgccttaagcaaaaaagaattcgctggggctgggccccgtgcctctcacctgtaatccaagcactttgggaggctgaggcaggtggaccacttgagttcaggagtttaaaaccagcctaggcaacatggtgagaccctgtctttacaaaaaattaaaaattagccaggcgtggtggtgcacacctgtagtcccagctacttgagaggctgaagtggaaggatggcttgagccccagaggcaaaggttgcagtgagccgagatcgtgccactatactgcagcctgggcaatagacaagactcttctcaagaaaaaccaaaagcattggttcacacaactaggaagtgcagacgtggtatggcctcaggctggctgacctaggcagccacagtgtctgcagggcatgtcctgctctttcctctgtgtgagtttcatggttccttcaaaggtggtcaccagatgctctaggcctacaccctctcagccttgcaaactcaataaaaaatgagccccttttccccaataacccaggaataatagtctcaaagctgattatcattgggcctccttggttaagtgcccatccctgacccaatcactgtaaccaggggtatggaccacaagccttcagccagaaaggcgtcagcctccactccagtcatatggaccaagggtgggaaagggtggttcctgtaggagaaccagagtgatgatacgagaatatggtgcatagactctgggcaggcagaaatacaggtgtcccctgcgatggaatcatcattctcatcttcattttacacgtgaagaagctaaggcccagggaggtctgtagttcatggtggagcagggatttgaacttggtctgctgcgtcctgggcctgaccagcacttccccagaatcattcattcctaaactttgattgatgtcctcttcagcccactttcctcctcttagaatccagtcagccctctacggattccagactcttccaacctggcatggcctcctcgtcttccattgagataacatacagaaactattctttaatatttattttcaaagtacaagaaaggagataagggtggtggcattgctatgacctaagcccagcatagctcaaactcacagtgaccctcagtattttgattggctggttgattctgtgtttgattggttcattgacctagccatccacgcatagcttcaacaagcattactaagcatttgcatgcaccaggcactatgggaggtgcctgggtgacagagatgacccaagatagggtccctgtcctccgagctccccatccggccttagctccttaccttgcctcatcttcccagggaggctgtggtcctcaggacatactgctgcccgctcaaccctagggacacgtggggccttcagtaaacacttctaaactcggcactggagacaagcagctgcatcctcattccctgctctcaggttctccacatgcaggtggggagtcacgagtctcatcaagcacacaacatgggcaggtgctgaaacattccactacgcctcttcctcctaaagttcttgtgagcatttgcagggctccaaacttcccaactgagatatgggccaggccagtctgagtgcatgtggccagccacacctccatccactgccctcccagctgcgcattcccctcccactggccacctgcccacctccacgtgctgtgtctgttgcagcggacaaggcaatctccatgctgcagggactgtgctaccggtcgctggggcccggcacctgcaccctgcctttggcccagcggatcaccaagcagatatgctgctgcagccgcgtgggcaaagcatggggcagcgagtgtgagaaatgccctctgcctggcacaggtaacctcctgttcccatcccagctttcactgcccaggggctcaaggccagtgaccatgttgccaggcctgggtagacttccctcaatctggaagactgaagtagccttccctgcctgctcacgtgcttatcccaacctggggctccctccctccttgctgccacaattgccgtgtctcccaaagggagggaaaggaaggccctggtttcctgcaggaacagcacctctcagtttgtcctctggctgttggctttgcagaggccttcagagagatctgccctgccggccacggctacacctacgcgagctccgacatccgcctgtccatgaggaaagccgaggaggaggaactggcaaggcccccaagggagcaagggcagaggagcagcggggcactgcccgggccagcagagaggcagcccctccgggtcgtcacgg

SEQ ID NO: 244 - DNA, 14962 bp, Homo sapiens
tttttttttaagacggagtcttgctgtgtcgcccaggctggagtgcggtggcgcggtctcggctcactgcaagctgcagctcctaggttcacgccattctcctgcctcagcctcccgagtagctgggactacaggcgcctgccacctcgcccagctaattttttgtatttttagtagagacggggtttcaccgtgttagccaggacggtcttgatctcctgacctcgtgatccacccgccttggcctccctaagagctgggattacaggcgtgagccaccacgcccggcctctcttgtccttttctttccccctcccagctatgttcaaatctactggaccccgtgtgtgtgcttccttagctggtgagctccctccttagaaggtagtcttatttgcctagcactgaaaactgtagtgcttaatggagttgtctcatcctccccaaccaactgccagatccatctgtccagtctccttgccaagtggaggtagttctcctgactctcctttctcttccttgttcctattactagagtactcctgattgtgacatcacattcatcccctgggcgatggagcttgtcactgggaaggaatactcagtcggagaatagccaacaagatgggttactgggagaatctcttcagtggcactgagtggaggcatcagggggttggagccttgtgaacagggaacctgccccccaacacttggaaggtaaagagctttgattcagaatcccattccaggcctcaaccctcttctctgtcgctcgggattccttctgcccttgaaagtccagttcttaaaacttctttctgcagaaagctttctgtgattaatctgtaccatttgttcttttttgtatatttacaacttacataaattattgacttttacttgttaataatttgcttaatacgtttatgtgtttttatgtgttttttttcctatgtactcattgggctcaagcctacaccttagtttgaggacaaggattatgtgtttcttcttttttttttttgagacagagtcttgctctgtcgcctaggctggagtgcagtggcatgatctcagctcactgcaaccttcacctcctgggttcaagcagttctcctgcctcaccctcccaagtagctaggattacaggtgcccaccaccatgcccagctaatttttgtatttttagtagagatggggtttcaccatgttggccaggctggtcttgaactcctgacctcaggtgatccacccacctcggcctcccaaagtgctaggattacaggcgtgagccactgcgcccagccagttgtttactgacctcttctttgggtttgacctttgggagcccaaagaaggggcatggcgccattgccgctgtttgagtccttgctcttttggacctctcttttttttttttttttttttgagacagagtcgtgctctgtcactgggctagaatacagtggtgcaatctcggctcactgcaacctccgcctcctgggttcaagcgattctcctgcctcagcctcccgagtagctgggactacaggtgcgcaccaccacgcctggctaatttttgtatttttagtagagacggggtttcgccatgttggccaggatggtgttgatctcttgacctcatgatccgtctgcctcagcctcccaaagtgctgggattacaggcatgagccaccatgcccggccctctcttctcttctttatccccatcaccaccaccacctaagttcagactcttaccgtcactctcctgacttagatgttcttccggtctccagtttctcccctgttaacatactgattctaaaatggaactattatcacattgttttttaagtccttcagtggctctctcatacccttcagaataaagtccaaaatcctcacagacttttcacagcatggcccttgcttgcctctccagccttgtctcttgacaggccctccctcccacctctcaggtcagccttttcttgaatcacttgaaattctctgaacctatcatatgccctcttctgggcatttggatgtgctattttatgtgcataacaccctaatgccctgctcccccaacatttagctgactcttgccctacaggacacgtttctggtgacgcccagtcctggaaaacttgtcaaaaccaccctctgctttcagcctgggttaggtattcatgtctcttgtcctcataaggtcctgtgtctactctgagtatttatcactttatattttaaatgtgtgcttatataatgtcttcccccattagaattacatttctttttttcttttttttttaaggcagagtcttactctgttgcctaggctagagagctgtggtgcaatctcggctcactgcagcctctgcctcctgggttcaagtgattcttgtgcctcagccttccaagtagctgggattacagatgtgcatcaccacgcccagctaatttttgtatttttagtagagctgggttttcatcatgttggccaggctggtcttgaactcctgacctcagctcatctgcctgtcccggcctcccaaagtgctgggattacaggcgtgagccactgtgccaggccttagaattaattttttttttttttagagactgaggctcgctgtgttccccaggctggagtgcagtggcgcgatctcggctcactgcaacctctgcctcctgggttcaaatgcttctcctgcctcagcctcccgagtagctgggattacagatgcgcataccacacccagctaatttttgtatttttagtagagacagggtttcaccatgttggccaggctggtcttgaactcctgacctcaggtgatccgcctgcctcggcctcccaaagtgttgggattacaggcgtgatccactgcacctggccagaattaaatttcttgagtcagcttccaccgagccaaatgactgctgcatagtagactcccagtaaatatttgttggataaatgaatggatcttggcaatgagtgtatgtttgtcacatatttgtaggcttcttctgaactggcctctttttcctgttgtcctttcaggacctgggtttcagtgatgagacatggggtatgatgtaacccgtttccagggggatgttgacgaagatcttatctgccctatttgcagtggagtcttggaggagccagtacaggtgagttggtctgatggcaggtttggtggggcaacaggtagcagtggaactagtagaaaatattcatgggcagcgggacccatggtgaagtcactgtgttcttctctccaccctcacccaatagagatttaggtcaaaggagtaatggtgactacaagaataaggccttccagaatcaatctagaggtggatgccacagagatccagtggttcagatttttttctgaggtcactctgaaagatttctcctgtaaaacagtcagctgcttgtttctgtcttgtgatagtagctgggtagcttcctttcctctacaggaactcttactaggttccatcttcctgtccgtgattgaacttctggactctcctaataagttctctctgcatttttatgatgtagtgcttcaggtaatcagccaggctccctgcaggcctcttctacctgcctactgtctaacaaataggaaggctgggcacagtggctcacacctgtaatcccagcactttgggaggccaaggtgggtggatcacgagttcaagagccatcctggccaacatggtgaaaccccgtctctactaaaaatacaaaaattagctgggcgtggtggcacacacctgtagtcccagctactcaggaggctagacaggagaattgcttgaacccgggagtaggaggttgcagtgagccgagattgtgccactgcactccagcctgggtgacagagtgagactccatctcaaaaaaaaaaaaacaaaaacaaataggaagtggggaactgtatgtactgacctatttttttcctgggatctactgaaaagaccagcttttgatacagccatgcactctgcattttgatgtgaaagctgccaccttcaataggtcatttctctgccagccttgccagaccagagtcagttgtatcatcctggggcaagtatgaggagaagctcacgattaccaggcaagtacaatgagtgaggtgaatccttaagagttgtattcatgggacagcatcctccaggatccttattgccctcattctgtaaataccaattaatcctttctctttcctggctatctagagattatcacattttccaaaccaggacactaggcaatgaggtttcatggcccttcccccattcactgctcacctaactcccaggggctccccttgagcctttattttttctcccagtactactccaaaaggagtactgatgccttgagctgaataaaattcagactgcattccaatggcaaccaactctggacctgtcttctttctaggcctttgcagtctgctgccattagaggcatattagatgggtgtggagcaagtcatcaagtagtagtgtcaagaggtcacagggtgtgtcaggttccctcctcaccctggcagggccttgtctgttttctggcactatcattttaggcaagtcacttatggaaaggtgagtcgtagttggtgacagtctagtcagaagccacccatctacctccaggctttatcttctgaggagcagagcaggcaaccctcatgatgccaggttcccagacacatttctaaggttagaaggctcctgctagggatgctgatttccccacatcataattatttattttttgaataggtgaaaaatgaacatagttcagaaatcaaaaggtatacagtgagaattctcacttctgtctttattactgtgcacctaattcccccacagataactatttttattagtttatttggtatccttccagtgtgtcttaaggcagatataagcaaatatgaatagatgtctgcatatatatgtatttgtgtatacatatgtatatatgaatatatctgtgtttcaccatgttggccagtctggtcttgaactgatctcaagtgatctgcctgccttggcctcccaaagtgctgggattacaggcatgagccaccatgcccggccttatttagctttgttttgttttgtttttttgagatggagtctcacactttagcctaggctggagtgcagtggcatgatcttggctcactgcaagctctgcctcccaggttcacgccattcttctgcctcagcctcctaaatagctgagactacaggcacccgccaccacgcccggctaattttttgtatttttagtagagacagggtttcgctatgttagccaggatggtctcaatctcctgacctcattatccgcccacctcagcctcccaaagtgctgggattacaggcgccatccaccatgcctggcctagctttcttacattgaatttttgccagtaaatatgtcctcctcctctctaaatctatcatctgaattatccttcaagacccatatcaaattctgtcctcttcataaatacctgccgtgattgagctagcctgaaaagacctcaccctcctctggacatttttggcaattattgtgtatgcaatccagatggcaattaataattggctgccttgtgtcatctgtcctattgtcctagaatatcatttgtatctcgtattgttatataactttttacttgtttgtcttgtttcacaactcatttttaatcttgagcacagggaatatatatatatatatttatttatttattttgaaacaggttctggctctgtcacccaggctggagtgcagtggtgcagtcttggttcactgcaacctccgccttatgggctcaagccatcctccatcctcccacctcagcctcctggctagctgggactataggcacgtgccaccaggcccagcttttttttttcgagatgtattgcccaggctagagtgcagtggtgtgatcttggctcactgcaacctccacctcctgggttcaagctattctcctgccttagcctcctgagtagctgtgattacaggcatgcgccaccacccctggctaatttttttatttttagtagagacagggtttcaccatgtcggtcaggctggtcttgaactcctgacctcatgatccgcctgcctcggcctcccaaagtgctgagattacaggcgtgagccactgcacccggcctatgcccggctaatttttgtaatttttgtagagatggggttttgtcatgttgtctgggatggtctcaaactcctgaggtcaagcagtgtgcctgccttagcctcccaaagtgctgggattacaggcatgagccaccgtgcccagcaggaaacgtatcttaagcctgtcccctacaatgccttgcccgtagtagatctatactttgctgtgacccagtggacctcttgtcgtagaggctgctcaaaggcttgattggctttgtagagttgtcatatccaggctcttaggtcctgctaattcccttgcgccccttttgccttgttctctcttctaggcacctcattgtgaacatgctttctgcaacgcctgcatcacccagtggttctctcagcaacagacatgtccagtggaccgtagtgttgtgacggtcgcccatctgcgcccagtacctcggatcatgcggaacatgttgtcaaagctgcagattgcctgtgacaacgctgtgttcggctgtagtgccgttgtccggcttgacaacctcatgtctcacctcagcgactgtgagcacaacccgaagcggcctgtgacctgtgaacagggctgtgggtgagatttgttcccttctgccccacatggataagggccatctcatttatgcccctgtctctggctgccctcctcactagctgaggaggtctctttggcatgttggcaaggagtattcttagcctccttggcttcctgctctaagatcttactttcttgctgcttttccaactataatcattttgctcttgctttaacaaaagaaggggcacagcaatttagtaaatttgtgtaataacattaaaggttgattgactctattcttccctttcagtccaatactactttccgtttgtcaggttgactgctataattaccagccttctcatatttcctcttgccctatttttttatttctgtgggttatgaaatattcgactaaatgttgatagctgaagggcatgttagctcacacctgtaatcctagcactttgggaggccgaagtgggcaagtcacttcaggccaggagttcaagaccaacctggccaacatggcaaaaccttgtctctactaaaaatacaaaaattagccaggtgtggggccgggcgcggtggctcacgcctgtaatcccagcactttgggaggccaaggcgggtggatcacgaggtcaggagattgagaccatcctggctaacacattgaaaccccgtctctactaaaaatacaaaaaactagccaggcgtggtggcaggcacctgtagtcccagctacttgggaggctgaggcaggagaacggcatgaacctgggacggggagcttgcagtgagcagagattgagccactgcactccagcctgggcaacagagcgagactccgtctcaaaaaaaaaaaaaaaaaattagccaagtgtggtggtgcacgcctgtaatcccagctactcaggaggctgaggcatgagaatcacttaaaaccagaggtagaggttgtagtgagctgagatcgcgccattgcactccagcctgggtgacagaatgagactctgttccccctaactaaaaaataaaaagaatgttgatagctggggctgtgaatatagggcttctctgaaggaataagtgcacaggcagaatctgtaggaggaaaaggagagctgtgcagtagataaaaacagtgtgtcaaaataaataaataggccccgtgcggtggctcacgcctgtaatcccagcactttgggaggacgaggtgggcggatcacctgaggtcaggagttcaagaccagcgtggccaacatggtgaaaccccatctctactaaaaatataaaaattagccaggtgtggtggtgggcacctgtaatcccagctactcgggaggctgaggcacaagaattacttgaacccatgaggcggaggttgcagtgagctgagaccgtgccattgcactccagcctgggtgacaagagtgaaacttggtctcgaaaaaaaaaaaaaaaggccaggcgcggtggctcacgcctgtaatcccaacactttggaaggccgaggggggcagatcacgtgaggccaggagtttgagaccagcctggctaacatggagaaaccccatttctactaaaaatacaaaaagttagccggccatggtggcgcgcacctgtaatcccagctactcgggaggctgaggcaggagaatcgcttgaacctgggaggcagaggttgcgctgagctgagatcatgccatcgcactccagtttgggcaacaagagcgaaactccgtgtcaaaaaaaataataaaaatacaaaataaaataagtttaaaaaatagataaaacactgtgtcttgattggggaaagaaatttaaggaaaatagacagcaaaggggcaagtaggaagcttggacgaagaaagtgaagggaataaacaagagggaggcctgaaatgaatgttagaaattttgggtaggacaaaatctacttagcagttatctgccacagaataggccatttgcatacatgtcccagggatcacctctgttctgctctttccccaccctggtctgcagcctggagatgcccaaagatgagctgcccaaccataactgcattaagcacctgcgctcagtggtacagcagcagcagacacgcatcgcagagctggagaagacgtcagctgaacacaaacaccagctggcggagcaggtaggccccaagacacgggggagaacatatccctcatatgcagataactgcctgcctgtgggtaataaaaaccagttgtgaacacacagaccagtgcttacacttgtgagcctagatgagtggatattctgcctgtggcttagcagggaatcagattggagctctccttgacttttcttcatcccattcatagcattaattcacctaacagttatcacatgcctcctctgtgaaggcacatttgtaagtactaaggagacagctgtgagtgagacagtcttatccctgtcttcctgaagcttacaaactggttgttcttcagatctctcagttgccctcattcttggataaacttttgtcttttttctgctgtctgccttaaccattattcctgttcttcttccccacaacagaagcgagacatccagctgctaaaggcatacatgcgtgcaatccgcagtgtcaaccccaaccttcagaacctggaggagacaattgaatacaacgagatcctagagtgagtgtcactcaggacgtggagtgatttcatgtcctgacaacaaggcctgaaaggaggaagagcaggagagtagcagaaggagggcattggagagctgggctgggggtcactgcttctcagatattggcattaaggacaggggcagaggagaagaggataacccttagctccactacaggatgtcttatgcgtttgggtggatggagggaaagcctgcccaaggatgcactttatccagaattaggtgagtacccatgtacaaagccctgtattaaaggctgtggagtgctaggagggccaaaaagaaatagaagatatcgtcctgtcttcaggtagcttacaacccagagaagaggaggcagagtgcaagtccaggaaagtgatctctaaaatgcagcaaaaacaagcgaagtatacaagtgaagtctaagatctctttcagttctggagtcctatacagttcatagagtaaactgtaagtgtgaatcaatatatacagggcaaatagtgctgagtgggacataggatagaggaataattgttttattcactaaacatagagcactaactgtgttaggcgctatatgtgctaagtattggaatttcaaagaaaagtaacagagacagagtgcagacttgtggaatttaatctggtgagtaacatgtggtgactcagttgggaccaagtggggaaagatttggggtttctgagccaatgatggaaggaaagaaggaagaataggtaagctgagtgcagagtgggtagttatttctattagcagaaaaagccaatacagagaaaggagatgagctggaatgaccatctttaaccacctccacacaggtgggtgaactcccttcagccagcaagagtgacccgctggggagggatgatctcaactcctgatgctgtgctccaggctgtaatcaagcgctccctggtggagagtggctgtcctgcttctattgtcaacgagctgattgaaaatgcccacgagcgtagctggccccagggtctggccacactagagactagacagatgaaccgacgctactatgagaactacgtggccaagcgcatccctggcaagcaggctgttgtcgtgatggcctgtgagaaccagcacatgggggatgacatggtgcaagagccaggccttgtcatgatatttgcgcatggcgtggaagagatataagagaactcgactggctatcaggaagagatggaaatcagaaaatcccatcactccagcagctgggacctgagtcctacccaccattcttaatactgtggcttatacctgagccacacatctccctgcccttctggcactgaagggccttggggtagtttgctcagcctttcaggtgggaaacccagatttcctccctttgccatattcccctaaaatgtctataaattatcagtctgggtgggaaagcccccacctccatccattttcctgcttagggtccctggttccagttattttcagaaagcacaaagagattcaatttccctggaggatcaggacagaggaaggaatctctaatcgtccctctcctccaaaaccagggaatcagagcagtcaggcctgttgactctaagcagcagacatcctgaagaaatggtaagggtggagccaaatctctagaaataagtagtgaggccgttaattggccatcactgatggcccttagggaaagactggacctctgtgccaagcagtatccctgttcagcccaccttaaaggtgtaggcacccactgggtctaccagtatgcaggttgggatactgaaaatttccagatgagctcttctttcctacaagttttcataattagggaatgccagggtttagggtaggggttaatctgttgggggttgatgtgtttagcaagaagctactcctagcttttgctaaaatatggttggcactgcctcttgtggcacaggccataattgttccatagacccctctctagccctgtgactgtagttagttactttgataattttctttggccattgtttgtttatatttcacaaactccacctactgccccccccccctcttttttttaagaatggcctgatcatggctatctcagccacattgttggcaatttaatttatttacttccttttttttttttaagaaaggaaaaaagaaaaaaaaatcaaacttgaaacttttcttttgatgttcctattgtgggggttctggatagggtgggacagggatgggggtgtgttttatattttttccttttcagcacaacctttggctttaatataggaagagccaagggagtcctcggctgaacttacgatatctgccccaaacctctgtaaccccaactgaaatgaggagcttcctctcttcctgtgaaggatatgacagtccagcatcgatgcctgtgccctctggaaaaatttcctcctagcccttccagggccttatcataaaactctggatttagagtattcattttgaaggcaactcccccttccccaagtttccttggagctgtatagctgggttctaagcttcaccatgcaaatcagaaattttatctctaagtacaggctgtgccgtgtctcacccacacccccctggggacttcagttccatttcaggttacctggggtataccttgatccctagagtgactggcagagtaagagaaggggagagataataggtgtgattattttaatatggaggtgggagtgtggttggagatagaaaggctcctccccaccatgtaatggcttcctctcagaattttattccaggctagcttgctgcaggtctgggtagttggatcatggctccactgggattggggtggaaagcttgaggggagtagggttccagctctgggacattgtgctcaggaatttgaaaacgctgctatacttactctggttactacatttcttccactcccctttcccctacctgccttaaccaaggctcatactgtcctgtccttaccctcagatggagccaggaagctcagtgaaaggcttccctaccctttgcactagtgtctctgcaggttgctggttgtgttgtatgtgctgttccatggtgttgactgcactaataataaaccttttactcaactctctaaattcttcagcattactccctttcttgagaaggtttcccctctgcttttgcctttctctcaccttaattccctttcttccttactttgttacctacccttatcttagtgctaacttctctttcaggaggatgtctgggagtagtgtgcacttcacagctgctttcccatgtaccctcctgcattcttccctcctatctcctgttctgtagcagccaaagctctctagtgatctgaactgtgtacttcccagggtctgcctttatcctaaattccatgtcttccctgagtggtcctgagtttttgggataatttctacagaagatatgtatatatctttttcctttgtcccacaagcaactttgctttagaatctagaattcctttgcaggcagagaagtctctacctcccagtgtttcctagctaagaacgtaaatgtgaggagggaaatgtacttgcagaggtttcataattatttacttataaaaatagtcttcatagccgggcgcggtggctcacgcctgtaatcccagcactttgggaggccgaggtgggtggatcacaaggtcaggagttcgagaccatcctggctaacacagtgaaaccccgtctctactaaaaatacaaaaaattagccgggcgtggtggcaggcacctgtagtcccagctacttaggaggctgaggcaggagaatggcgtgaacctgggaggcagagcttgcagtgagcagagattgggccactgcattccagcctgggcgacagagcgaggctccgtctaaaaaaaaaaaaaaaaaaaaaatagtcttcataggccgggcacggtggctcacgtctgtaatcccagcactttgggaggccaaggtgggtggatcacaacgtcaggagatcgagaccatcctggctaacatggtgaaaccctgtctctactaaaaatataaataaattagccggacaggcgcctgtcctcccagctactcaggaggctgaggcaggagaatggtgtgaacctgggaggcggagcttgcagtgagctgagatcacgccactgcactccagcctgggcaacagagcaagactccgtctcaaaaaaaaaaaaaaacaaacagtcttcataagtatttgctgctacctttccctgtcataagaaaaaggatagccagacatggtgggacgccactatgatcccagctccttggaaggctaaggcacaagaatcgcttgaacctgggaggtggaggttgcagtgagctgagatcatgccactgcactccagcctggtgacagagcaagagcctgtctcaaaaaaagaaaagaagaaaagaaaaagggatatcttttcctcctcccagaagtttgttttaaatttgagcatttatcatgcacctgatgtaaacctaatagtactcttgatactctagtggcttgaaaaaaaaaaaaaaaggcatttctgtgctgagtctgcgcttctatgcacacaaggtatgtttataaaatactgataagcatgtcacagtatagagcataagaggcaatgtatgtatcctagtgacattagcagtgcttttccccccttaaactcctttaaaattacttttagaacttgctgctcattcttgtgaatgttatgaatggtgtcatattgtccttttacagaagatacgatttttagaaacaaatattcattgaatgtctgccctgtgagatactcactagagtgaacatgaggaggcttatgtagcaaaatggcacctacctgcaaagaacttagtccctaatggagatgaatatataataagggatcataaatgtgctaagtggatttactagtaatatgtgagccaaggacgataaagctcctgattctgatgggtatcaggaaaggcttttcaggaagtgttacttgttataggtcagaggtcagcaaactacaggttacaaccccactgcctgcttttgtaaaaaactttattggaatacagttatgcccacttggttatatattggctggggctgctttcacattacaacagcagggttaagtaactggaacaaagcctaaaatacttggtcttttacagaaaaaaatttgccaacctgttctaaacttttaaggtcacgagaactgggggaaggagggagtagaaagaacactgtcacccagactggagtgcagtggcaccatcatatagctcactgtagcctcaaactcctgggctctagtgggcttcccacttcagctttctggagtagctggggctactgcaccccggaaatgtcctaatctgttttaatactattaaaattttttttgtttcatctc

SEQ ID NO: 245 - DNA, 1036 bp, Homo sapiens
gtgatgagacatggggtatgatgtaacccgtttccagggggatgttgacgaagatcttatctgccctatttgcagtggagtcttggaggagccagtacaggtgagttggtctgatggcaggtttggtggggcaacaggtagcagtggaactagtagaaaatattcatgggcagcgggacccatggtgaagtcactgtgttcttctctccaccctcacccaatagagatttaggtcaaaggagtaatggtgactacaagaataaggccttccagaatcaatctagaggtggatgccacagagatccagtggttcagatttttttctgaggtcactctgaaagatttctcctgtaaaacagtcagctgcttgtttctgtcttgtgatagtagctgggtagcttcctttcctctacaggaactcttactaggttccatcttcctgtccgtgattgaacttctggactctcctaataagttctctctgcatttttatgatgtagtgcttcaggtaatcagccaggctccctgcaggcctcttctacctgcctactgtctaacaaataggaaggctgggcacagtggctcacacctgtaatcccagcactttgggaggccaaggtgggtggatcacgagttcaagagccatcctggccaacatggtgaaaccccgtctctactaaaaatacaaaaattagctgggcgtggtggcacacacctgtagtcccagctactcaggaggctagacaggagaattgcttgaacccgggagtaggaggttgcagtgagccgagattgtgccactgcactccagcctgggtgacagagtgagactccatctcaaaaaaaaaaaaacaaaaacaaataggaagtggggaactgtatgtactgacctatttttttcctgggatctactgaaaagaccagcttttgatacagccatgcactctgcattttgatgtgaaagctgccaccttcaataggtcatttctctgccagccttgccagaccagagtcagttgtatcatcctggggcaag

SEQ ID NO: 246 - DNA, 134 bp, Homo sapiens
ccagcattttgggaggctgaggcgggtggatcacctgaggtcaggagttcgagaccagcctggccaacatggtgaaaccccgtctctactaaaaatacaaaaattagccgggcatggtggtgggtgcctgtaat

SEQ ID NO: 247 - DNA, 401 bp, Homo sapiens
  SITE (322): n equals a,t,g, or c
  SITE (395): n equals a,t,g, or c
gcctgtaatcccagctactcaggaggctgaggcaggagaatcacttgaacttgggaggcggaggttgcagtgagctaagattgcgccattgcactccagcctgggcaacaagagtgaaactctgtctcagaaaaccatatcagagttcaaacttgactttagcatttaacctaatactatgagccttagtttactcatctttaaaatggcagtcattatatactttgtagtagtaagcattgggaataatgttttagtgtacattagatagtattacaaatcacttagtgcctgggtcataatagttattcagtgaaatggntatgattgttattctctactttcaaacatactcaatatataacaacccatcatataactaaccatcaacccanatagcc

SEQ ID NO: 248 - DNA, 139 bp, Homo sapiens
gctaatttttgtatttttagtagagacagggtttcaccatgttggccaggctggtcttgaactcctgacctcaggtgatccgcctgcctcggcctcccaaagtgttgggattacaggcgtgatccactgcacctggcca

SEQ ID NO: 249 - DNA, 281 bp, Homo sapiens
catgtaaaccataaatacatatgtctactatgtacccacaaaattaaataaaaataaaaattatagtaattattctctagtatttcaactgctaccttacttgctatttctgtgctacctttcatagtagaattccttaagaattttctttacttgctatctgcagttcttttacttctatcatctctacttcagtcaaatattcctcccattttccaccaaaactgtccttgttagtgtcaccagcacccttcatgttgctaaatccagtggttaatttt

SEQ ID NO: 250 - DNA, 159 bp, Homo sapiens
ctgggtgtggtggtgcatgcctgtaatcctagctactcaggaggctgaggcaggagaatcacttgaacccaggaggcggaggttgtggtgagccaagatcgcgccattgcactccagcctgggcaacagagctagactctgtctcaaaaaaaaaaaaaa

SEQ ID NO: 251 - DNA, 226 bp, Homo sapiens
ccaaaccttgaaaccatagttaaacccaattgactgcctgtgccatgtcagcatctgtgcagctaaacatgtcttgagaaataccatggtgattgatctcatttgaaataaacctcaagagagcccttaatgctattgggcaattatactgtatttctgtatctccatcactttcctgttctcccaggaaatgatttaattccttctttcattacctcaaacctcc

SEQ ID NO: 252 - DNA, 474 bp, Homo sapiens
ggcctgttctctgaggttctccctgcaggaggatcataagaaaaaggaactgaactaatgatataagcgattttctaaaaatagccctgcacctctgccctagggaggaagggaaaggcccattcatctagctgcaccctgaagtagagcgatagccagtgacagagaaggaatacaaggataatgaagaggctcagggattacaataagaaccgtgtggccgggcgcggtggcttatgcctgtaatcccagcactttgggaggccaaggcgggtggatcacgaggtcaagagatcgagactatcctggccaacatggtgaaaccccttctcttctaaaaatacaaaaattagttcggtgtggtggtgggcacctgtagtcccagctactggggaggctgaggcagggaaatcgcttgcacccagtaggcggaggttgcagtgagccgagatcgccccactgcactccagcctg

SEQ ID NO: 253 - DNA, 474 bp, Homo sapiens; identical to SEQ ID NO: 252

SEQ ID NO: 254 - DNA, 474 bp, Homo sapiens; identical to SEQ ID NO: 252

SEQ ID NO: 255 - DNA, 124 bp, Homo sapiens
agatgaataattaaataattgtgcatatatatatatatatttacatgtggtcattaaaaattgtgttacccttctacatgctaacatgaaaacagttctgcaatatattaatttaaaaagaaaa

SEQ ID NO: 256 - DNA, 159 bp, Homo sapiens
tttttttttttttctttgagagaggctcttgctctattccccaggctggagtgcagtggcgtaatcacagcttgctgcattccctatctcctttcctgggctcaaacaatcctcttgcctcagcctctctagcatctgggaccacaggtgcgcaccacc

SEQ ID NO: 257 - DNA, 393 bp, Homo sapiens
ccatgttggccaggctggtctcaatctcctggtctcaagtgatctgcccacttcagcctcccaaaattctgggactgcaggtatgagccaccatgcccagcctaaagaggtatttaaaaagtcatttttgataagaaaatgtggaacattattttggtcttttaggtgtcttgaacatagtctacctaatcatctagacaggaagataattaacctctattttaacaaacatttttcttcttgaaatgaaatattcttttagataccaaaatgaattaaaattgagtgattactattaaagctgcaaaattatttgggagactgagatagaaggatcacttgagctcaggagttcgagaccagcctgggcaaccgtgaaactttgtctctact

SEQ ID NO: 258 - DNA, 4558 bp, Homo sapiens
gactaaagatgatcttctggatcatgtaccgccagagtctgtggatgttgttatgttgatatttgtgctgtcagctgttcatcctgataagatgcaccttgtcttacaaaacatttacaaggttagtgatttggggcctgcacttgagggttggacagtctggattcttttacttaccttccctcatgaggctcatgtactgtctagattcacatagtctctccattctcactaggtaggctgtgtagtgagtgtatagaaaggggtcctctggcataaaacatccaccctaaattctgatttgtgcagtgccatggctgctcttcagagcttcgccagccctgggacaaggatgattttgcagttacctgggatccatggagtcctgctataaggtgagaggagttatggtttagtggtcaagagtacacagtttggccaggtgtggtgtttcatgcctgtaatcccaacactttgggatgccaaggcaggtgaatcacttgaggtcaggagtttgaaaccagcctggccaacatagcaagaccttgtctaaaaaaagctaatgtatgatcattggcagatcacttaaccctgttgagtattggtttccgtgtctcatgtgagaataataatcacattcctttgtcccacagttgggtgaagatacaatgagaaaatgtatggttaagcagtcaaatgctaggcatgtatcagtcattagcaccgtgattgagctatacattgtggcacaatgaaatgagagctgaggctcagaatgaggaaaaccaacctgaatcagtaaagagccaaaacgacattctggttttttgtttgtttgtttgtttgtttttttaagagacagttgaatacagtttgagtactaggagatggtgaataaaatgttgcaagaaagtgcttcaatgaggataacactttcatttattgtctctaacacttatttatttatttttgagacagggtcttgctgtgtcactcaggctggagtgcagtggcatggacgtggctcactgcagcctcaacttcctgggctcaagcagttctcccacctcagcctctgaagtagttgggactacaggacgcactaccagatccagctaatttttaatttttgtgtagagatggggtctcactatattgcccaggttggtctctaacattttaatcctgtgacactggacattccagggtgctcttggaggtactcaagaattgtcttcagggacgagcgaggtggctcacgcctgtaatcccaactttgggagactgaggtgggcaaattacttgaggtcaggagttcgagactagcctggccaacatggtgaaacctcatctctactaaaatacaaaaattagccgggcatggtggcgggcacctataatcccagctactcgggaggctgagacacgagaatcacttgaacgtgggagacggaggttgcagtgagctgagattatgccactgcactccagcctgggcgacagagcaagactccatctcaaaaaaaaaaaaaaaagaagtgtcttagtgttatggagccctgcctggtcttactatctttttaagtagtaggccattttggttccgtattatgggcatttcagtctgtccccttagtaactatcacaaatttattttaagtcctaacttaatcaggttttattttgacagggttctccaaagtcatgttcagcctgcttttgtttcataggtattaaaaccaggcaaaagtgtcttgtttcgtgactacggactgtatgatcatgccatgcttaggtttaaagccagcagcaaacttggagaaaacttttatgttagacaagatgggaccagatcatatttttttactgatggtaagatgaatggaatccagtctttaaatgttttattctttgtttctgtttatttgattgcattatcactgcaaggctgcttggagaaggcttgcgacatgtgcacgagaccctgaaacaagccctctactgcacaatatttacccagcacctggaaggcacagacctggcccctgcccttgaagagctcacaagccttctctggtgtcagtgactcccctaatgagcttgggttaatggacagcctctgacatgccatgtggattccctactaggaattgtgctggaataagagggagggcaagtcagaaacttcttgtccagttaaaaataaagcaaatttgacagtataatgccttgagattactttcccatggcacaaagtcaggaaacctttttctgtagaattgattggatctgttttggggtttggtttttttgttgtttttgagacagagtctaattctgtcacccaggctggagtgcagtggtgtgatcttggctcactgcagcctccaccttccagactcaagtgatccaccgaagcctcctgagtagctgggaccacagacacatgccaccatggctggctaatttcttgtatttttggtagaatgggggtttcaccatattgcccatgctggtctcgaacttctgagctcaagtgatccatctgtctcagcctccaaaagtggtgggattacaggtgttagtcaccatgcctgtcctggatctgtttttaaataaatatgcaaatttgctgtaaagaggcatttatttatttttgagacagagtcttacaggctggagtgcagtggcatgatcttggctcactgcaacccccaccacccaggctcaagtgattctcatgcctcagcctcccaagtagcaaggattacaagtgtgtgccaccacacccaactaatttttgtatttttagtagagatgcggttttgccatgttggccaggctggtctcaatctcctggtctcaagtgatctgcccacttcagcctcccaaaattctgggactgcaggtatgagccaccatgcccagcctaaagaggtatttaaaaagtcatttttgataagaaaatgtggaacattattttggtcttttaggtgtcttgaacatagtctacctaatcatctagacaggaagataattaacctctattttaacaaacatttttcttcttgaaatgaaatattcttttagataccaaaatgaattaaaattgagtgattactattaaagctgcaaaattatttgggagactgagatagaaggatcacttgagctcaggagttcgagaccagcctgggcaaccgtgaaactttgtctctactaaaaataaaaaaaaaaaaatattagccaggagtggtggcatgcacttgtggtcctgctgcttaggaggctgaggcaagaggatcatttggccccagaagatggaggctgcagtgagctatgatcataccactgccctccagcctgggcgacagggcgagaagcctatctcaaaaaaacaaaacaaaacaaaacaaaatgcaaaattatcaaaataggttaaaattcaaaagatgttttaattcataaaatttaaaccaattgtaaatattgagaagattcagtgatatctgcagagtgcttcagagcacgttctctggagcaatgctcttagtacgagtctttatttttgctgcctcaccatttattctgtttgtttcatttaatgtgtagtgatgtattatttgggttagattttcctggagctaggtcaccactgggtgtttttctccactctgatcacaaattttcctccttcgtgttaggatgaataagatgtttgatgtaaacaaattgagcacatgcagaccttgtaggagtatagccaatttttatgtttttgttcggagatgggaaacaataagataatttttaaaaaggaatataatcggccgggcccagtggctcatgcgtgttatctcagcactttgggaggccaagattgggggatcatttgaggtcaggggtttgagaccagcctggccaacatggcgaaaccctgtctctactaaaaatacaaaaaaattaaccaggcatggtagtgtgtgcctgtagtcccagctacttaagaggctgaggcaggagaatcacttaagcccaggaatcggaggttgcagtgagccgagatcgtgctcctgatctagcctgggtgacagagtgacattgtgtctcaaaaaaaaatttttttttaattaaaaaaaaaaaggaatataaccaatttggaattgtttctttttactcgggcttttgtatttgagaattcataataaggcaagatgcgaacaccaggttgtccttcaccttgttctgatttaattgtttaattggaggtttctgtttgggtagaagaggagaaggagtgtattagttcccaaatcaaaacctttaaattttagcattgaggttttcatttaaaaaaatattaaaatagcctcagccctctatccctcctcaaggactgcaaagcaaatgtaatgttatgaagactgttgagcattgttgatgcttgtcttacagacttcctggctcagctctttatggacacaggttatgaagaagtggtaaacgagtatgtgtttcgagagacggtgaataaaaaagaaggcctgtgtgtgccaag

SEQ ID NO: 259 - DNA, 646 bp, Homo sapiens
ggagcagtatgaagaagaggtgagaacgacccccggaccgaccaaagcccgtgcgccgctgtgtcccgcgtccagcacctacgtcccgccgccgtcgccatcgccgcggccaccatgcccaagagaaaggctgaaggagatgctaaaggagataaagccaaggtgaaggacgaaccgcagagaagatccgctaggttgtctgctaaacctgctcctccaaagccagagcccaagcctaaaaaggcctctgcaaagaagggagagaaggtacccaaagggaaaaagggaaaggctgatgctggcaaggaggggaataaccctgcagaaaatggagatgccaaaacagaccagtcacagaaagctgaaggtgctggagatgccaagtgaagtgtgtgcatttttgatagctgtgtacttctggtgactgtacagtttgaaatacaatttttttttttttttttttgagacggagtctcgctctgtcgcccaggctggagtgcagtggcgcgatctcggctcactgcaagctccgcctcccgggttcacgccattctcctgcctcagcctccggagtagctgggaccacaggcgcccgccaccatgcccggctaatttcttgtatttttagtagcatggggttttcacc

SEQ ID NO: 260 - DNA, 1131 bp, Homo sapiens
aaaatcactctttcgtctgggtgcggtggctcatgcctgtaatcccagcacttcgggaggccgaggttgggggatcatctgaggtcaggagtttgagaccagcctggccaacatggtgagaccccatctctactaaaaatacaaaaaaattagctgggcatagtggcgagtgcctgtaatcccagctactcaggaggctgaggcaagagaatcgcttgaacccaagaggcggagactgcagtgagccaagatcatgccattgcactccagcctgggcgacagagtgagaccctgtttcataaataaataaaatcactctttttactttatatattttttgagacaggatcttgtggtacgcaggctggagtgcagtggtgtgtgatcacagctcattgtagcctcgacctcccctgggctcaagcagtcttcctgcctcagcctcctgagtagctaggactacaggtgtaagccaccatgcctggcccttaattttttttaatgagcatgtacagtagtcccgctttatccatggtttcacttaccacaatttcaattacctgttttcaactgcagtcagttacttttcttaagatattttgagggttataggctcatgcctataaccccagcactttgagaggccaaggccagcagatcccttgagcccaggagttcaagaccagtgtgggcaacatggtgaaactctgtctctacagaaaatacaaaaattagccaaatgtggtggcatgtgcctgtagtcccagctggggtgggaggttagcttgagcctggaaggtggaggttgcagtaagtcgagatcacgctactgcactccagcctgggcgacagagcaaaagtctgtctcaaaaaaaacaaaaaaaatttgaaagatcacattcacataacttttattacggtatattgttaaagttgttcttttttttttagagtttggtaccatcttggtttcaggcaaccactgggggtcttgaaacataccacccgcagatacggggggctactatgtactttttgtattaaaaaataggaagtgtatgtgtgtgtgttagagacatgtaaataaaatttcaaggcctgaaaagtagtcaaagttttatagaataacat

SEQ ID NO: 261 - DNA, 23626 bp, Homo sapiens
cccggcgctaagaggcggggtttccttgcgccgcgcgcaaggctggggcaaaacccgggccgggatagggcgtggggccgcgcgtctggacgtccctcgcgtcgggcccgacagcgcctgcgcactgcgccgccggctggggtgctgggggcggggcaggggcaggtgtagcctctgtgcctcgttgtcccctggcgctacccggacatctctcagggtgccggcaccatgaagatctggacttcggagcacgtctttgagtaagtttggggcgcgggtcggctccgtggagggcaggcacgccggccctggagtagaggcgaggcagaggcggcccgcaggaggcttctaggcgtcgggcctagcgaggggagcgaactctgaagcctgcgggccccggcgacacggagggcagaccaaggtcacgaccccgaggcgccctagccgaggggacggctccgacctccagacccaggcggccttgcgaccggcagggctacggggtcacttccgggctgtcccccaccatgaggtagcctcgggccggcggcctcctgaggtcctgggggcgtcgcggagcacgaagcccttgacagcactcagggttgccccatcccgccctgtgaaaccactttgggacgtggacccgaggatcccaagagggaggtgttggttttctccagagtgtactttccctggccgccgtttgggtggagtttctaccttcgaatgtgaatttcgggtgaactctgaccaccaggatgtgaagccttttcacaactcgttcatctacgcagcagagccttggatttggaattcaaggtctagctctggctgtaacaagcgtgtgaccctgggttacccattttcatctgagagatggaaaaggacgatcgtcagggcctacccgtgttagctctttgaggccacgttcaggaacatctttttggataatgtgaactgtttactaacgaaactaagccttgaaccagttggatgtggagaattatattctcttctaggtccctgattccatttacaaaagagccacaaatttaagcagcgaaatccttttttttcccgagttacctgctctgttccgctgatcttaatgtcgttgccacactgttttaattagtatagccttgtaaataaatatgctacaaagccatttatgtttttaaaactgtctctgaaggcaaattttttttaaatttcttttttgaggcagagtctcgctctgttgcccaggctggagagtagtggcgtgttcttggctcactgcaacctccgtctcccgtgttcaaacgattctcctgccttggcctcccaagtagctgggattacaggcgcccaccaccgcgcccggctaatttttgtatttttagtagagacggagtttcaccatgttggtcaggttggtctcaaagtgattcgccctggtcaggtcgcacctgacctcaggtgattcgcccgccttggcctcccaaagtgccgggattacaggtgtgggccactgtgcccggcctctgaaggcaacttttaaaacgttgtccgcatttgtactcagtgggacacatcctagggcctgctgtatcctgcaaagtatagaatactggaatcagaaggaagctttcttttccccctactgtttagtctttttgggaggaaaaagacccgaaatttgtggtcatttagatgttcattaacctggtcgcattcatcactagtccatttcagctccgaggatgtttaatttcagtcctcttccaggtttgcatgcttcagtcctcttctgggtttgcatgcttcagaggttctcggcactcagtctccctagaactgtcttctcccatatcttccctaactcttcttcctggctcatcccctccttccctctacactctttctgcctttgtcttcagcgcttccctgtcttttcccattcagtgtaaatgttcagtgagattctgtgttggccttcctatattggattttacctgtgatcttaatttcttttttgtttctcttttcgtcacagactttttttttgtcctgggagaagcagccctgatccgtgctttctccccacataatctgagctgtttggtcaaagtcccaaatgataggtatacatttatggcacccagatctgtaccttgagctccagcctctcttgagctccgcttttcattttcaggtgcctgttaggcattgctaccctcgtgtcccacaggcccttaaaactcagcctgtctgaaattgaagtcatcatctcccctgacaaatctgagcgttgtttctgatctttaggatgtcactctctaacaatgtctaagtcatcattctacatcttatctgtctttgattttccaacacttttcttctgaggcctatagttggcatccaggtgaagtcattcattgattccttcaacttatagagatgcccagtatgtgtcagccactgttctttggattgattacattttcataagtaaatcaagacctcgatgctgcgccagtggagttaataatgtcctcacctcgtttcaaaggtgaagaagttggaccggtcagtgagccatagccaggtcctcctgattctactttggcgtggtctttgaatgtcttccattgtgagatcttttccacgtaattatgttaatacagctcagattaattgctggaagattaatcataataagtattgtttgtaatgtttgagctggttatggttcataaagcaatcttgagccaagctaagtcaacatcagtggtttcaagttggttcagaaaggagagatggactaaattacaaataatgcataaccaccctgaagtcatgcgattattaattttttagagagggttgggggaagaggtaagggcatggaagccagctaaccatggcatatgactggatggagacctggggagggttcatctgattttcattttagagagttgccttggtaagaatcagtgcttggcctgtatgcttcgatttgtcgggacacttcagattgatgaagcaactctgcttatatacctgcattgattgctggataaggctggagactaaagacagaatgaggttcattggtacaatattgtatagaaaagaatattataatgaaaacattaaaaatgatgtcactggttgtccagggttctgggaaattaatggagttgagattttccttttgtcaacgagatgtagttgtcaatctgagttctctaaaaggttggaataatgtctacttgttttacttttagaaaaataaaaagtaatgctgtgtggcttaacagtcattgtggcttgaacatcatccccagatcttgtctttttcctttaaatgaagatgagagcacagataagtagtgtagaaagcatccgaatcagactgcaggtggactaagtcacctttaatactgattgtacttaataaggggtccttttgaaaatgatattttttgtacaagtgtcttattcacagaagttgtgaagtgaacaaaggttgcatcacattttgaatcatccaagcacatgtgcctttttgaagaaaataaagatactgcaagttctcaagtgatgtgatattattaccacttcaatactaggtgataagcaagtgcttattatattaaaagagaatattagaaaatagtatattaggagtgcaccttaaggacattttattatattgagtgaccttttcaaaacagaaatcagaatcactcttttgagaaaaacagtagataaagattgactggaggagccattgttatgtattacattaaaatgaagggaaagttcaataattaaatcaatgctttggatctttttgtgatccctgtaagaatttatagtgcccataaactcttttacttttgttacttccgtataaactgatagaattggggtcagaaaaaataataaatggcataatgatacttttggctatttgtttcagtagaacataatttttaaatacattttcatgaatcactggttcttcctagaaacaatttacatgtgaaagtggataaggataagtaggaaagatggtgtagactgctttgatctttatagatatgagtttttttacatagcctgtattgtggaaaaatactgaagcctgttaaaaatgtagatcagtttcccataatcatcagtgtttcagaaggtaatttttcctaggtaaactcattaaacttacattgtaatgaatgatttgatagattataaaaattgtttaactcatatgcataattttaaatgtctgaattttttttttttttttttggttcacatcggcagccacccgtgggaaactgttacaacagctgcaatgcagaaatacccaaaccctatgaacccaagtgtggttggagttgatgtgttggacagacatatagatccctctggaaagttgcacagccacagacttctcagcacagagtggggactgccttccattgtgaagtctgtaagtgtgtctttattcccggagaaatgtgactgctgtagagaagttttctaaaccgcattatactttcaaataggttgtgggagccgattctgaatgtcattttttgcatccgttcaagttgtattataataaacttgaattatgggtgtataatgaattggaaatattattacagtcttcatgaaggcacccaataaaattttcttaaggaagccagctaatgccgtgtgatctgaaaggagttctattctgctttttctgcttttgccagcaacttgagaccaatactaaggtttggcagtaatggtctggtcataattgttaggtgacagttctgtggtcagtggtgggttgtgtacattaagtaaggactatgttctcggacttgttattgccacatttgttccaaggtctggaactccttcctgtacatttagaaacaattctattcccttaagaatgagcaggctttagtgagcagattttaccaggaagaaactaaaatgccagtttaccataatgcgagaaaactggtataataagtggatccaggtttctttagagggtctctttatggagagtaggttcactaagaaaactaaagtacacattttcaataggaatgtacttactgcctccttatgcaaaccatagtgcagacacagaaatgagcagggtcagggggtgggcttggggtcatagcacagggagtgacagtggacactgacgtgtgagcctccatcgtaagaacgctgtttttctgtctggagaatgaagctgaggtgccccctcccttgggctgttctaggaagatactgacagatgcctttgagttctcctttttctagctgccatgttgccccaaacctgatttccatatctcagcctcagcgctccaccgtcgcaccgcggcagattcagcgtgctgcctcacgttgcagacgttctcagtgggctggtttctaattgcctccgggaaaagtttttgtgtctggcagtctcctctcatccatgatatgtgaataggcctcctttctgacctttgcttgtttcctctggtttttagaaaacagatttttggttcaaaatattgtaacacattttttccttcaaataaaatattgatacacttggtaagaaattcttcctcctctgattcctagttctgaatgttttacttagcttattggtgcagcaagaacgaaaacatatgtgcaagaacattctgtagttgatcctgtagagaaaacaatggaacttaaatctactaatgtaagtcttggctcccttttgtttcatttcgaactgtctggctgagttctttgtccctctcctagttgccgtagaagtgagtgcgtgttcatgatgtggttcagagaatccctgcttatgtgctggcctaacttggccctggatgttgcttccttacccttcctgctctcatgatcttgcctatctctaaggggatagcactcaataaaatgagtttgggattatgtgtattatcattattatactttatttcctcaactttgctttttaaataaaaagtaggcagtgaatagtttatgcaataatagcagcggtttatttgttgttttgtatgtttagtaagattttggcttgtgtgttgattttagcaacattttgaatcttcagttccaaaatgatttgatcttttttttttttcttcattctgtagatttcatttacaaacatggtttcagtagatgagagacttatatacaaaccacatcctcaggatccagaaaagtgagtaaaaaatattttaacaaatgtatcgtaaagggtgtttaaggtttttttatcaagttttttgaaaatgaaagctgggtcatctgaacctgtgtgaatatgttttgttccagaactgttttgacacaagaagccataattaccgtgaaaggagttagcctcagcagttaccttgaaggactgatggcaagtacgatatcctcaaatgctagtaaagtaagtgaggctgcttcttggttattattccctggttcatttcctgggaatggaatggggtgctgactgcatgtgtgtccttgtaagctgacccttgcccattctaccataggaaactgcagcacgttgggcagttacttacaaaggctctgggttcacatccaagctctaacttttagccttttaaccttgggcaactaagttaacctttctatgcctcagtttcccgtttttaaagtggagattacccgttttacagggttggcgtggagtgaatgagataacatatggaaagtgtgtagcctgaggcccagcactgaggaagtgctcgatgatgtgtagctgcgtgtcatttaaggcactgtttctcaaccttttttcactgttgtctcccccacaactcgttttagacattttttccctaattgccacctccattaagtcatatatcatatacatatgtgtgggctttatacataaaagagggagattttttccatccccccaagaaccaatttttgcttattgagaatgcatgatctgaaacagtaagtttagagaaagatgccatgcactgttacataacacatggtgaatgtggttatcaagagatactcatggatgccttctctgtgccatgcagagtgctaggctagacagggtatacagcagggagcaaaacaaatgtggtccctgcccccgtggaactaagaggcaggtgacattaatcatacagcatgtaattaggaaagaaaaggtacagaaaggtatgagagtgcttattgagtgttcagtaactgatgtttctgctgactgccaaatgggggcaggtggattgcgaggggtattccaagaagagtgttctaggtggaggagctgcgtgtgcaaaggccctgagacaggaagtagggaatgctctgtttttcaaggaactatatagaacactaggagagaaggggtgaggagtgagttgaggaccagatcctgcaggaccttgcacaggattttggtttaaaatgtaaagaaaagggatttgaccttcttgcccctaaaaaggggaccactataatcatgaaacaaataagacattctgtcatttaattgtagattcatttgagaacatcttttgcatacaaagtaaaagtcagtttatggatcaagccagttgctcaaggcatttgatgtttgctaaataacattagaaaaagccaggacaaaaacgatctgtcatcctgagattgagttaaacttgtcacgccccttgttacttcctggtgtgtcattagttcgatatatgcctttgctctccctcagtaacaataaatgtattggattttttttaagggccgagaagcaatggaatgggtaatacataaattaaatgctgagattgaagaactgacagcctcagcaagaggaaccataaggactccaatggcagcagcagcgtttgcagagaagtgatcttgacagttggtagacaacatcgggtactccaggtctctccaaactgactatatatttatttgttattttaaaaatacaactatattttgggtagttttttttttttttttgataagttggtgtaaggctatgtgacttgatcaaaacagatgcagggcctctaaataaaagggatcatctgaaattaatgttgtttgaaattactatctgattttgagggttccagtatttctgtgaaaattcaacaagaactccttggaaactggtattgatattcagtctccttaaggtagatttttcaagcttttcatacattggaactccacctgactttggaccaaccccagaacagagcagagccacctcctatagacgcccattgccctgctgctgtacacttcagcagcttgcacaagggagctcacttaaaaggagaaattgtgtagttttaaaatatattttgtgtaaaataccttactatgctataaaccaccattaaaaaccagtgttttgatttggtacttaaatatttttggagtgaaaattatcactaaagtaacatgactccaacaaaagtatggtttcattataaaagagtactgtattgatttgcccaagttttgtaacttagtaaaggtattaacttccttggatttgtactttgtgatttagtatgctgtatcgtgggctggttatgttaactgaaaaaaataaagtcattacctgagttttgcagtgctctaacttaaacagaagaacagctgttcacatcttttagcattttacatttgcctaacttaaaaattgccatgtgtcaaaatcatggttttgtaattgctaaggcatgatatgtcaggttatttgaatataattactttttgaagtaattgtgaccacaaaacatcttttttacatgaaggagctgtgtatcatttgaaattactcaaatgatgtcttgctctgaggcataaatcccaggtacttagtgtttttaataatacggtgccactgcaggatttgggggcggtggggaagaacaagcataatggtagggggaggcttggcctgaaactaaccactgagtgaattgcactgcaggttttacttaacgggaattccttatttgggatgtcaagagggcagctgcaaactgaaaaacaatccagtaaatgtactttgttttatgtattgtagcaggcaattaactactaaataatagctttgacatttgcaattgttgcatagagactatttttgctagaagatgattagctcttgcctttattttacagtgcttagtgtgataaacttctagtcatgtttcctatccaagagaccagttaatatatgtacataaaccacagaaatagtataacacactatttttaaattatcgttttcctacttaaattttgtttagcttaagacttcttaggacatttgtaaaagcaggttaaatttaataaggtttctgatttttttttgtaaccggagatagtttttacaagtgaaataacatttcagctaaataaaacatcgctaaataattgatatttgatgaaaatctgctttgtataatttctgtaaattatccttgttctgaaaaaggtgtaatgccctaatatttttaaatccttatccttttttaaaaactgacctattgataaaactataaattttcattttccagtgcagttagttacctttttaaacataaatgcacaacaagcaaatgaatttaagagaactaaactggaataagtgttcataaatgaaacccttggactatttaataaagttgaaatgtgaattaaggaaaacttttgttaataaaaactttcttttaagtgatgtttttcctgattataatttctttttagtaattaaaggtgaagggcaaaggcttttttttctttatgagagaaacactttaattcctagactgtgagccttcactgcgttgggttagtttctctaaatcacaggctctgagatgagcattttcccggccgcctggcagttccctgtgcctccagtgggttttcctcacatttttcttcccatccattccgggcaacagtgacaactgttgccttacccttcgtcttgtcgcacatcggaagcaggtcctagaactacagaaaacgctagggggtcctccactgggtttccagggtttagtgtcactccgagaaagggggtgccctaagagcctttctaaatctcagctctcaggacacgcttgtctgtccacagatttaaaaaagccggcgccgtttccctgaagcgggcgcaaagccaggccctcggggcggccgtgcccgcgccgcctcgcgtcctcgcttcccgaaagcacgcggctcagtggtccttagcgagcggggacaccccggccttcttgccccggtcgtccccgccggggtaatacggaaggtcgggggacacacgccccgggagctcttggagccaataggtgggcgcggccggccggcccgccccgggattggcacccgcagtccagaccgcgcgcgcccattggctcccggcgccggggggcttccgcggcagggcagcaggggccgtgctcaggggcggggccgggtaggaggcggtgattggcaggtccgcacgccccgcctcttccgcttctgtggtctgatcttcctgcggctgaaccgcccggctgagccgacattgccggcgtcttggcgattcggcccgacgagctccgctttcgctacagcatggtggcctactggagacaggctggactcaggtaggcccaggcctccagagggaagggcttcgcgagccggcccgcgcgcatcccggtgcccagaggtcatgcaggacacagagcagcggccccacgcgtgaccggggttgggccaagcctcgggcgtcgccgccaagatggcgtcgctgtgggcaaagcgctcaggcgggcgcggcctcgacctcgcgtgggagcgcgtctgtgtcctgcctcgcttcccgacggtgcggcccagcacccacagagtgcccctggacacctttgtgaatggcaggtttctcgagagagaggccagctcttattcagcaaacctttttcttctagaatggtgctggagccaggtggtgaaagtagtacagtcacatccacctcgggaaacaggagatttctctccacgtgaccgccgttagcagctttgacctttaatccagcatcgaggtggagccttttacaactttacacattttttttttaaacttttaagtcctgttgatttcaggtttccttatgtctaaaaggggtgaaagccataactgtcgagagcccctcacaaagatgagaggtggctcctggaaagctcaaatatggaacccacttgaggacatggtgtctcatagtggaaccgcaaaccattggtctagctgtcacatccgatttttttttacccgtgcacctgagtgagcagaagtaccttgctctaggtgacacaccttgttagttgactggatggtgtagcactttacattttgtgggtacactacagcggagcttcccgacttgctgaggtcaagccagcgaagtcttgtagaattggaaggatggaaggatgatagtcccagtagtagataccgtttattaggcaacctaccctgtgatccatactttttcacacttgtttttcctcctcccagctatcagcaggacaggtattattgtccttttattctgttgtttttttcaggtgagtgagtaaacgtgctgaaaaggttgaacagcctgaaggtcacccagttagtaagaatggaagcaggcattggaactcatacctctgagtccccaaaataaattctaaaacatgagaaaatagcacccctccccgcttcctgtttttcaaaagtgggaaaggtgatctgacatcttttggaaactacagtgttgatgggagtccatctaccaaacaggaagcaggttttacagttttgctagaattgatgatgttctctaagcacttttcagtttgatttagaaatcttcattaggaggttattttcagtggcagacttgtgagacagaattcagtattctcagagaagagtttaaataatttagaacgaattgttttaattcaaaatagttttctcttatgtatacctcattttccaagaataatataattaaagttttaaggagagaaatcgaggagagaattcatgattcatgttatagtctctaaacatttcagtctctttttttctatgctgtgggatttttaaaaacatttatgcatctttcattttgaattaatatacactaaagagaaaacacagtacaaagaagaaaaatcaaagatcatccatccaaacaccagttaatactttggtacatttttttctagttctttttctttgtatagatactttttggcattagtcatatttttaaatccaattctacaataaggtacaaccaaaccaaaataaaaagtacaggaagaaaagcgaaaacacagtaacagctgtctggctggaatattgataattaaccatataccttctctcattttctcccagctacatccgatactcccagatctgtgcaaaagcagtgagagatgcactgaagacagaattcaaagcaaatgctgagaagacttctggcagcaacgtaaaaattgtgaaagtaaagaaggaataatctgtaagttatggatttatttagaagaacagttgcatcttaagtttttggagcaccataaagatcaaaataattttagttttgggttctattcattttttagtcagtgtatttggaagttagttattgggatggtataatttaaagcatgcaggttatagaagtcccctggcctaataaaaagaaagtcttcttgggccctgacaagcagaagtaattggcacattgattttcagttcatttagcaatgcttaggtagagagccatcgtatttgaattaaacctgtttcatttgtctgcacaaatcaaataatttggaggatgaactccccacttgtataattgcaattggagttacataacagtccaagagcatgaaaaactacagttctttacatttttatttcccccacaaccactaatgttctcacaaatcactacttcccgaacataataactacaggcacaggcaagggtcctgctgttgtatcaagcaataaaatctgcaagaccccgcagcgaatactgttttgctaatttattatgctttcagagggtttggttcattttacttttccaaagatgttggtgatgtaaagttaaattctcgtgaaataaaaaggtctgtacagttgataagtgtagacttttgtgttccacattataaaagtggtttgatctctaaagtactttcttgacattgttatttcaaaagtaggcaaggcaaattatcagagagatgtttttcagatttaatttttcttgttttgcttttaaaaagcttcagacccataatagcacagaaatgtgataaatattaatcctttggcagcttatggttatgagcaattttacttattggaactgtctcccctaagcacttttcattttcattttgaattagtaaatattttattacaagtctggagatgcagtgttttgaatttagccctttttctaggggctctctgtctaatctcataattctgagtaatgagacctggttttatgttgggtggttttgttttaacagtaagctaacagaaaatcatttagcctcactcggctcagagctgccagactgcatctaatgctgagattttgcaaagtcctgggggtcaggaagtagtgtccgatccccttaaacaaagcattagcccctctctgttatgcccttcagggttacagaccccacctcattagcacaaggagatgttagtgtcttttaaaggcaaagtagtttctttattctgggagagtgtttacttttactcagcaggaaaatgcctgcttgactaagcctgtgtacttgaaccagcactttttacatctgagccacggcaatgtgaatgatagccacagttatacagttcactataaggaagttatttcttatattcatgttgagtttttaagaaaacacagagaactagccagcaacttgcattttctttttcctcctagaccctgactaaagcttgaaatgctacatttccaaggtgaagatgtgtgggcacatgttatggcagattgaaaaggatctcattccatgggaaaaaaaaaaatcctgtcttgttcataaattgacaatgtcaataaattgaaatatggttcactgttactcttgattttagtttgtgagactttttcattttctttaaaggaactgtctgcacagctgcatgattatggccatgtgaaccagggtttcttaaaagcaggggaagccagatttaatatttagtgaccaaagggatacagaaagcattttgaaaatgtctcaaaatagttgtttcatgacattaattggtgatcaaaattatctgctgtcattgaggcttcgtagtcccttatttttgaattgttgtcatgtcagaataatgacatggttatcagtaacaaatggaaataattattaaatactaaaagtgtagattagaagaagaaatactaaattgtacttgttttgtattgtgcacttaaagcctatagataagaacggttacagaatttaagcacaaagtgtttttcacattgttttgtaaatgaatctttatactctggtagcatttctcataggaaatgaggcaaagctattgaataacttgctcattgagttgatggccaaactgaaattaaaacctaggagttttgactgcaagtctgggacacggtgaccacaacagcagtttcgtggtatttccatagtgattcattcattcattatttagggatgaaaaattgttgcaagttatgtttttatctttctttgaaacttgaaagggcttgggcaagtaaaacaccattgcaaagttaactgcctgattttaactgtttttggagactggagaaataaatttgaactggaaattttgaaacaccattctaggatcagttctcacatggtacttaagctcacaatgatttatcagggccactgtcagcaatgccgaggataagccgaaaagaacatctttgttctcggcttctgggaatgacttattgtcccgacacttgacctgtaggttttactgaattctcagcacagagcgagcagggaggcagagccgattgagtggaagagggtgcctctggaaaacagcaggttaggagcccttggagtcctccgcctcggagctgtcatcctgctgttggcaagttagggcacctcagttcagtgctgtggcccccaagattaaggtactaggaagtatcctccattacagggaacaggaataaatgaatcaaaaagctatcgggcctttttgacatgggacgaataaagtaactaataggcaaaggggctaaatgatttccagtcaagtaattagagataagtcatttattaaggaggcagatggggtattattggtatatagatggcatagtagattgctagtatattggtagattattggtatatagatggtatgttaaggaggcagatggggtattactggtatatagatggtatggtagattggtagtatattggcagattattggtatatggtatgttgaggcagatggggtattactggtatatagatggcatagtagattggtagtatattggtagattattggtatagagatggtatattattaaggaggcagatggggtaattagaggtgagacttagggacagggcttgtgatatggaaaggagtgaagtcactgagtaaaagacaagtttactgtcagcagagattcttagaggctcttttctccgtgattaaaaaaaaatcctaaaccagtagtataataaacttcctgcctccagcagtgctgggtagctggcaggatgactgtgcccagtgatgaggtgaccccagtcagaccaacttaatgagtatcccactaactagttggatgatgtttgaagctgtcagttaatctcttagttcacatcgttcttgtgagcaaagtgaaggaatcggataagctctaaatttcggtgatgctgctgctctgagagaccaaggtcgctggagcaaccgtactgctaaaggataagctcttcaaaatcaaaagggacagatttcttaagtttctagtttgttttgtgtttttacatctatttctaccatacgaaagagtaggatggtgagatgcatttctaaatatttttaactactcagtctggatggttaggcttcaagaaaaggaatttatttagtctgaaataaagcaattttgccatttaaaattgaattactttgtagtttaatgattactattgagcaaacaaatctttacagtaatataagtcagcaaaagttttttaaaaggtttaaatccctccttccttacatctatttcattgcttttttaggtttgggaagtaaagcaccagaggaagcatgtgtaaatccttgtataatcgcaggctgtaagtctttagcatctcaggaagttactaacttcaaactaagtatataggtagagtttcttactaaatctagtgcttcttgaaccacaagtagaaagcatttaaaacatgaatgttgttttgtgttttttgaagtttgtaaatagaagacttgttgatgatccgatggcaaggtatttttctcttggtatgtattttagttatttcctcgtgatgcataagtgaaaagagtgaagtttctcagaatgagcaactgtcatccatctacctgctattttattattgctgattacaaaagcaaatcaagagatgagaacccagttgcctgcaagtaaatatttactgcattgagggtcggagcattttcccattaccggttatccatggatcaaatagtgtatctcagtggtaattctagagggccattaaaaccctgatggtgctggaagagatggcagtgctgcatgtcagaaataggtaaactgtaattaagaagttacagatgatttgattacgctcttgtgtatttggtcctgttataatgtgagcagattaaaatcatgtagtgcttaaagctatgtcattatgcaaacatttatggcaacttctgcaaattaatttgaactgtaaaagttccctaatgagacgatgtcctccataactgagaaggacactgcagccattgctgcttaattcctgcatttgaatggttgccgagcgcatggtgtgccctttctcaaagagcagagaggctgcagagcattttggggggtgatgactgaatgaaagtgaaaagaccatttcaaaatagcctttaaaaggaaagccaaggatgattattaatgaattcctgggatctaacagtagtaagaaatttaaactatataaacatatatgttaaaggctagctcttcagaaataaagatcagaagactgcagttctttagttttgcttgtctttttgtttttcttgtttggaccaggtatttttgtggagaggactgtggcttttcttttttcctcttttccagttagcatgttgtatgcacaggtctacacaacatggatatttctagtggatgttgactcacattgaccttggctctgtagctccccatgtactagtcaggcacctggctcttctggaggctggcaggcactggaaagcaggatgccagtcagtgtttgctcagaggaaagaacctaaggaaagagtcttagtagccctcggataccaagtgaggattccagggtgcctatcagtgctgctaaagtataaaaatgtaacaccaactccagtggctccctgcaaatccacacgtgtagtctggatgcctggcaaacactttgaaacaaagggagcactttacaataaatttgctatttttttaagttaataagtatgcactgaacatcaaactcttcaaggttagtagatgtcagcaaagaccctaatgcctgtcagctgctccccacctgtctccctcagtccctgtgtcgaagctaatggtgagtgcatatcattcactgtgctgcagtgcagagtgggttttggagtgctgcaggagaaacactcatctaatgagaaactgttctgtaagcgactccgcggcacagcttctctcacagttaatgtcccttatcttctggctccatttctgcctcctccgtgacctcttcatcttcctctagaactgctttggcatcttgaaattgttggtactcggataccaaatcatggatgttattttcagcttccccaaattcgtttatgtccatcccttcgctggtgtaccagtgcacaaaagctttccttttgaacatggctgagaaatgctcagagaccctattaaagatctcttggatggccgtgttgttgccaatgaaggtggcggccatgctcagcccccggggcgggatgtcgcagacagccaccttgacgttgttgggaatccactccacaaagcagctgctgttcctggtctgcacggagagcagttgctggtccacttccttggtggacatcttgccccggaaaatgcaggccactgtgaggtagcggccacggcggaggtcacaggcagccatggtattgcgggcatcgaacatctgctgggtgagctcggccacggagagggctcggtactgctggctgccctgggccgtgagtggggcaaagccgggcataaagaagtgcaggcgggggaaggggaccatgttcaccgccagcttgcgcaggtctgcgttgagctgacccgggaaccggagggaggtggttatgccgctcatggtcaaggacactaggtggttgagatccccataggtgggtgtcgtcagcttcagggtacggaagcagatgtcatagagggcctcattgtcaatgcagaaacaggcatctgcattctcaatcagctggtggatagacagaaccgcgttgtagggctccaccaccgtgtccgacaccttgggagaaggcatgacgctgaaggaattcatgatccggtccgggtactcctctctaatcttgttcatgagcagagtgcccatcccggagcctgtgcccccgcccagggagtggacgatctggaagccctgcaggcagtcacagctctcactctcgtgcctcaccacctctaggacattctcgatcagctcggctccctccgtgtagtggcctttggcccagttgttgccagccccagagttacctgtggccaaaaagagaaaccagcaggggaagaaaggtgaaaagagaagggcaccagtaaagcatccccccctcctcctggtggaaccttctggaaaaacataccatggacaaaactgtcgggttgaaagagagctcctaatttgctagatcgaatgctgtccatcgtcccaggttctaggtccaccaagactgctcggggcacatatttcctacctgtgtagaaaaataggaaaaagtcagcctacttgtttttctaaaagttaatgttttatcaaaatagaactttgtgatactggtccaaaaaaaatcatggatattctagaaaggggcccttggtaggtcgagatttgagtatctaacatcatattttttaccccaacaacaatcccacaaatctatagaatacccagaaacaatctccatcagtctgctctgtgatattgccagtgacagagattctcttccttcatattggaaatgatcctggtttcatttgtgaaaccacaaaggaaagtgagtacttaacctgcttgtgttaaggtgtgtgccatatccagcagctccttccccattcctgcgtcttgaccagggcttggggacccaccactctaggatcctgctgccctgcctgtcgcctccctgagcatagacatcactgctttgacatttccatctcctgggcctctgcccttcctctgcttgtgttcccagttgcgggaccactgctcccagagccccgccagtcctaccgtaggcttcgttgtagtacacgctgattctctccagctgcaaggccgaggccccgcggtcgctcccagccaagtcgatcccgtgttcctcaccaatcatctcccagaactgaaagcaggaggaaggtcagagtaaacggaccccgaaaaaggctgtgttaaccacagagaaagttagcattcccaagcctgtttccctctggttgcctgaccctccccaagacattcttttagggccttttcataaataaccatggcatcattcgctttttgcctctactaagcaatgtgaagtaatatgaagattgcattttctccccacctgaactccttaaataaaatgtcaaacacaaagtactaaattggattttcctcctattaaattcatgccattatatacattaaagctgttgttttagaatttaatgtcaatatagctctaatttctccttataatgctccaagctagtaaagtgtagattccattaaaggaaaataaactgaattcttatctgatttcacagtaataactcatttcactttggggatttcttttcatgaacttttccaaacagcccataacttggacctctgtgcatgattttaagtaattagcgcctttttttttttttttttgatggagtcttatctgtgcagtggcgtgatctcggctcactgcaacctccgcctcctgggttcaagcgattctcctgcctcagcctcctgagtagctgggactacaggcacgcaccaccacgcccaactaatttttatatttttagtagacacggggtttcaccatgttggccaggatggtctctatctcttgaccttgtgatccaccctccttggccttccaaagtactggaattacaggcatgagccacagcacccggcctttctttcttttttttatttttttatgtttgtttgtttgtttgtttgtttgtttatttattttgagacagagtttcactcttgtcacctaggctggagtgccgtagcacaatcttggctcactgcaacttccacctcctgggttcaagcaattctcctgcctcagcctctcaagtagctgggattacaggcgtccaccaccatgcccagctaatttttgcatttttagtagagacagggttttgccatgttagccaggctggtctcaaactcctgacctcaggtgatgcacctgcctcggcctcccaaagtgctaggatcacaggcgtgagccactgtgcccggccagtaatgtgcatttttgattgtcaggtatacatacaactcacaattacacatagttgtcctctggtaactatttgaaacatactgcacttccagtcacatacacagtacttattaatatagatatgtgccaagctcttaatatggaaacagttactgggaagactccttttgatcaccctgaaaggcacatattaaaatgcaatgaaaatgtattcacatatattaaaatccccaagggtatgttaaaaaccccagccatatcttctaaatgacagtgctgctctggccatggtcttaataacaaggcagttcatggtaaactgccagcactgttcagggagtggaagaataaataaattcaagttctaagataccccaaattaaatgtgtcttaaagttcttatatctctaaatgatgagtcagccaggactctcaacgctagaccatacgattccagagtgagagctaaaaccctatctaaacctaacactttctcttgagggcccctttccgtattatcttccagcttcagagcagcagggctcctgcctcccacttctctgtgtgtgagttatgaatgtcttacccctgaggcatggaggaatggtgacttcttttcaagcagtaatgttccttgcccccggtttaaaacgcctgcatttaaaagccttagttgtttcctggcagcattactcacagtagccaaaaggcagaaacaacccaagtgtcattgatggatgatgaatgtaggtgtttcaaaacctcacttttaatgcatctcatattagtaaaagtaatttcacagcagcaaagagaacacgataaattttgcacggtgcaattggtcatcttaaaatcaagattggagattgtgggttcgggcatctgtgttcttggggttggccaattaagttacgtacttgggggaaatttttaagcaggggggcaagggaaagaaaaactcatttatattccagacagtgtattttaattaattatgttactgtacacaaaaaacttttattttcaattaaatttcttaaattttcaattgcatactaataaaacagtaattgattttttttaagcgttacaataaacatgagaggggaggggaaagacaccatagtgacagggtacagaaagtttctcaaaaaacttcaaaaagctgttttgagacaaattactgtttttagatatgaaaagttcattgttaagataaaagtgggccaggtacagtggctcacgcctataatcccagcacttcgggaggcccaggcgggcacatcacctgaggtcaggagttcgagaccagcctgaccaacatggtgaaaccccatctctactaaaaatacaaaattagccagacgtggtggcgcatgcctgtaatcccagctactggggaggctgaggcaggagaatcacttgaacccaggaggtggaggttgcagtgagccaagattgcgccattgcactccagcgtgggcaacaagagtgacactccatctcaaaaaaataaaagatgataaaagtgccaggcacggtggcctacacctgtcatctcaccactttggaagcctgaggcagaaggatcacttgagcccatgagttcaagaccagcctgagcaacaaagtgagatccctgtctctcaaaaaaaaatttaaaaattagccaggcatagtggtgcatgcctgtaatcccagctactcaggaggctgaggcaggagaatagcttgagcccaggaggttgaggctatagtgagccatgattctgccactctactccagcctgggcaacagagtgggcaaagaaaaagatgataaacgtattatgtaatataatggtcggcatgtattgtacatatgtatctatggataaaattaacattaattaaattaacactctaagcacttaatgtgtgttgtagctctttagttaaagattgtttccttcttttcccatgtgaaatttttttttaagaattaaagcccaaaggcattgtctgatatttagcaagtacattaaatctgctagacttattgtcttccctgctaacttagggtatttttttggttgtccgcctctatggactgtggtaaagctaggattagtaaccagacattacttaccttggctccgatctggttgccacactggccaatctgaatatggacaatttcacgcatccttgctctgagcccaagtctgagatcttcacggaatcctcagactctcagaatccagagcttcggttcactggtgtgagcccaacacaactgtggtcactgcagtggtgggactggccaaccaagctaccctcacaatgtgaccaagggtgtgtccaccccagaggcccagctccccgccctcagccagtcctgg

SEQ ID NO: 262 - DNA, 23632 bp, Homo sapiens
cccggcgctaagaggcggggtttccttgcgccgcgcgcaaggctggggcaaaacccgggccgggatagggcgtggggccgcgcgtctggacgtccctcgcgtcgggcccgacagcgcctgcgcactgcgccgccggctggggtgctgggggcggggcaggggcaggtgtagcctctgtgcctcgttgtcccctggcgctacccggacatctctcagggtgccggcaccatgaagatctggacttcggagcacgtctttgagtaagtttggggcgcgggtcggctccgtggagggcaggcacgccggccctggagtagaggcgaggcagaggcggcccgcaggaggcttctaggcgtcgggcctagcgaggggagcgaactctgaagcctgcgggccccggcgacacggagggcagaccaaggtcacgaccccgaggcgccctagccgaggggacggctccgacctccagacccaggcggccttgcgaccggcagggctacggggtcacttccgggctgtcccccaccatgaggtagcctcgggccggcggcctcctgaggtcctgggggcgtcgcggagcacgaagcccttgacagcactcagggttgccccatcccgccctgtgaaaccactttgggacgtggacccgaggatcccaagagggaggtgttggttttctccagagtgtactttccctggccgccgtttgggtggagtttctaccttcgaatgtgaatttcgggtgaactctgaccaccaggatgtgaagccttttcacaactcgttcatctacgcagcagagccttggatttggaattcaaggtctagctctggctgtaacaagcgtgtgaccctgggttacccattttcatctgagagatggaaaaggacgatcgtcagggcctacccgtgttagctctttgaggccacgttcaggaacatctttttggataatgtgaactgtttactaacgaaactaagccttgaaccagttggatgtggagaattatattctcttctaggtccctgattccatttacaaaagagccacaaatttaagcagcgaaatccttttttttcccgagttacctgctctgttccgctgatcttaatgtcgttgccacactgttttaattagtatagccttgtaaataaatatgctacaaagccatttatgtttttaaaactgtctctgaaggcaaattttttttaaatttcttttttgaggcagagtctcgctctgttgcccaggctggagagtagtggcgtgttcttggctcactgcaacctccgtctcccgtgttcaaacgattctcctgccttggcctcccaagtagctgggattacaggcgcccaccaccgcgcccggctaatttttgtatttttagtagagacggagtttcaccatgttggtcaggttggtctcaaagtgattcgccctggtcaggtcgcacctgacctcaggtgattcgcccgccttggcctcccaaagtgccgggattacaggtgtgggccactgtgcccggcctctgaaggcaacttttaaaacgttgtccgcatttgtactcagtgggacacatcctagggcctgctgtatcctgcaaagtatagaatactggaatcagaaggaagctttcttttccccctactgtttagtctttttgggaggaaaaagacccgaaatttgtggtcatttagatgttcattaacctggtcgcattcatcactagtccatttcagctccgaggatgtttaatttcagtcctcttccaggtttgcatgcttcagtcctcttctgggtttgcatgcttcagaggttctcggcactcagtctccctagaactgtcttctcccatatcttccctaactcttcttcctggctcatcccctccttccctctacactctttctgcctttgtcttcagcgcttccctgtcttttcccattcagtgtaaatgttcagtgagattctgtgttggccttcctatattggattttacctgtgatcttaatttcttttttgtttctcttttcgtcacagactttttttttgtcctgggagaagcagccctgatccgtgctttctccccacataatctgagctgtttggtcaaagtcccaaatgataggtatacatttatggcacccagatctgtaccttgagctccagcctctcttgagctccgcttttcattttcaggtgcctgttaggcattgctaccctcgtgtcccacaggcccttaaaactcagcctgtctgaaattgaagtcatcatctcccctgacaaatctgagcgttgtttctgatctttaggatgtcactctctaacaatgtctaagtcatcattctacatcttatctgtctttgattttccaacacttttcttctgaggcctatagttggcatccaggtgaagtcattcattgattccttcaacttatagagatgcccagtatgtgtcagccactgttctttggattgattacattttcataagtaaatcaagacctcgatgctgcgccagtggagttaataatgtcctcacctcgtttcaaaggtgaagaagttggaccggtcagtgagccatagccaggtcctcctgattctactttggcgtggtctttgaatgtcttccattgtgagatcttttccacgtaattatgttaatacagctcagattaattgctggaagattaatcataataagtattgtttgtaatgtttgagctggttatggttcataaagcaatcttgagccaagctaagtcaacatcagtggtttcaagttggttcagaaaggagagatggactaaattacaaataatgcataaccaccctgaagtcatgcgattattaattttttagagagggttgggggaagaggtaagggcatggaagccagctaaccatggcatatgactggatggagacctggggagggttcatctgattttcattttagagagttgccttggtaagaatcagtgcttggcctgtatgcttcgatttgtcgggacacttcagattgatgaagcaactctgcttatatacctgcattgattgctggataaggctggagactaaagacagaatgaggttcattggtacaatattgtatagaaaagaatattataatgaaaacattaaaaatgatgtcactggttgtccagggttctgggaaattaatggagttgagattttccttttgtcaacgagatgtagttgtcaatctgagttctctaaaaggttggaataatgtctacttgttttacttttagaaaaataaaaagtaatgctgtgtggcttaacagtcattgtggcttgaacatcatccccagatcttgtctttttcctttaaatgaagatgagagcacagataagtagtgtagaaagcatccgaatcagactgcaggtggactaagtcacctttaatactgattgtacttaataaggggtccttttgaaaatgatattttttgtacaagtgtcttattcacagaagttgtgaagtgaacaaaggttgcatcacattttgaatcatccaagcacatgtgcctttttgaagaaaataaagatactgcaagttctcaagtgatgtgatattattaccacttcaatactaggtgataagcaagtgcttattatattaaaagagaatattagaaaatagtatattaggagtgcaccttaaggacattttattatattgagtgaccttttcaaaacagaaatcagaatcactcttttgagaaaaacagtagataaagattgactggaggagccattgttatgtattacattaaaatgaagggaaagttcaataattaaatcaatgctttggatctttttgtgatccctgtaagaatttatagtgcccataaactcttttacttttgttacttccgtataaactgatagaattggggtcagaaaaaataataaatggcataatgatacttttggctatttgtttcagtagaacataatttttaaatacattttcatgaatcattggttcttcctagaaacaatttacatgtgaaagtggataaggataagtaggaaagatggtgtagactgctttgatctttatagatatgagtttttttacatagcctgtattgtggaaaaatactgaagcctgttaaaaatgtagatcagtttcccataatcatcagtgtttcagaaggtaatttttcctaggtaaactcattaaacttacattgtaatgaatgatttgatagattataaaaattgtttaactcatatgcataattttaaatgtctgaatttttttttttttttttttggttcacatcggcagccacccgtgggaaactgttacaacagctgcaatgcagaaatacccaaaccctatgaacccaagtgtggttggagttgatgtgttggacagacatatagatccctctggaaagttgcacagccacagacttctcagcacagagtggggactgccttccattgtgaagtctgtaagtgtgtctttattcccggagaaatgtgactgctgtagagaagttttctaaaccgcattatactttcaaataggttgtgggagccgattctgaatgtcattttttgcatccgttcaagttgtattataataaacttgaattatgagtgtataatgaattggaaatattattacagtcttcatgaaggcacccaataaaattttcttaaggaagccagctaatgccgtgtgatctgaaaggagttctattctgctttttctgcttttgccagcaacttgagaccaatactaaggtttggcagtaatggtctggtcataattgttaggtgacagttctgtggtcagtggtgggttgtgtacattaagtaaggactatgttctcggacttgttattgccacatttgttccaaggtctggaactccttcctgtacatttagaaacaattctattcccttaagaatgagcaggctttagtgagcagattttaccaggaagaaactaaaatgccagtttaccataatgcgagaaaactggtataataagtggatccaggtttctttagagggtctctttatggagagtaggttcactaagaaaactaaagtacacattttcaataggaatgtacttactgcctccttatgcaaaccatagtgcagacacagaaatgagcagggtcagggggtgggcttggggtcatagcacagggagtgacagtggacactgacgtgtgagcctccatcgtaagaacgctgtttttctgtctggagaatgaagctgaggtgccccctcccttgggctgttctaggaagatactgacagatgcctttgagttctcctttttctagctgccatgttgccccaaacctgatttccatatctcagcctcagcgctccaccgtcgcaccgcggcagattcagcgtgctgcctcacgttgcagacgttctcagtgggctggtttctaattgcctccgggaaaagtttttgtgtctggcagtctcctctcatccatgatatgtgaataggcctcctttctgacctttgcttgtttcctctggtttttagaaaacagatttttggttcaaaatattgtaacacattttttccttcaaataaaatattgatagacttggtaagaaattcttcctcctctgattcctagttctgaatgttttacttagcttattggtgcagcaagaacgaaaacatatgtgcaagaacattctgtagttgatcctgtagagaaaacaatggaacttaaatctactaatgtaagtcttggctcccttttgtttcatttcgaactgtctggctgagttctttgtccctctcctagttgccgtagaagtgagtgcgtgttcatgatgtggttcagagaatccctgcttatgtgctggcctaacttggccctggatgttgcttccttacccttcctgctctcatgatcttgcctatctctaaggggatagcactcaataaaatgagtttgggattatgtgtattatcattattatactttatttcctcaactttgctttttaaataaaaagtaggcagtgaatagtttatgcaataatagcagcggtttatttgttgttttgtatgtttagtaagattttggcttgtgtgttgattttagcaacattttgaatcttcagttccaaaatgatttgatcttttttttttttcttcattctgtagatttcatttacaaacatggtttcagtagatgagagacttatatacaaaccacatcctcaggatccagaaaagtgagtaaaaaatattttaacaaatgtatcgtaaagggtgtttaaggtttttttatcaagttttttgaaaatgaaagctgggtcatctgaacctgtgtgaatatgttttgttccagaactgttttgacacaagaagccataattaccgtgaaaggagttagcctcagcagttaccttgaaggactgatggcaagtacgatatcctcaaatgctagtaaagtaagtgaggctgcttcttggttattattccctggttcatttcctgggaatggaatggggtgctgactgcatgtgtgtccttgtaagctgacccttgcccattctaccataggaaactgcagcacgttgggcagttacttacaaaggctctgggttcacatccaagctctaacttttagccttttaaccttgggcaactaagttaacctttctatgcctcagtttcccgtttttaaagtggagattacccgttttacagggttggcgtggagtgaatgagataacatatggaaagtgtgtagcctgaggcccagcactgaggaagtgctcgatgatgtgtagctgcgtgtcatttaaggcactgtttctcaaccttttttcactgttgtctcccccacaactcgttttagacattttttccctaattgccacctccattaagtcatatatcatatacatatgtgtgggctttatacataaaagagggagattttttccatccccccaagaaccaatttttgcttattgagaatgcatgatctgaaacagtaagtttagagaaagatgccatgcactgttacataacacatggtgaatgtggttatcaagagatactcatggatgccttctctgtgccatgcagagtgctaggctagacagggtatacagcagggagcaaaacaaatgtggtccctgcccccgtggaactaagaggcaggtgacattaatcatacagcatgtaattaggaaagaaaaggtacagaaaggtatgagagtgcttattgagtgttcagtaactgatgtttctgctgactgccaaatgggggcaggtggattgcgaggggtattccaagaagagtgttctaggtggaggagctgcgtgtgcaaaggccctgagacaggaagtagggaatgctctgtttttcaaggaactatatagaacactaggagagaaggggtgaggagtgagttgaggaccagatcctgcaggaccttgcacaggattttggtttaaaatgtaaagaaaagggatttgaccttcttgcccctaaaaaggggaccactataatcatgaaacaaataagacattctgtcatttaattgtagattcatttgagaacatcttttgcatacaaagtaaaagtcagtttatggatcaagccagttgctcaaggcatttgatgtttgctaaataacattagaaaaagccaggacaaaaacgatctgtcatcctgagattgagttaaacttgtcacgccccttgttacttcctggtgtgtcattagttcgatatatgcctttgctctccctcagtaacaataaatgtattggattttttttaagggccgagaagcaatggaatgggtaatacataaattaaatgctgagattgaagaactgacagcctcagcaagaggaaccataaggactccaatggcagcagcagcgtttgcagagaagtgatcgtgacagttggtagacaacatcgggtactccaggtctctccaaactgactatatatttatttgttattttaaaaatacaactatattttgggtagtttttttttttttttttttgataagttggtgtaaggctatgtgacttgatcaaaacagatgcagggcctctaaataaaagggatcatctgaaattaatgttgtttgaaattactatctgattttgagggttccagtatttctgtgaaaattcaacaagaactccttggaaactggtattgatattcagtctccttaaggtagatttttcaagcttttcatacattggaactccacctgactttggaccaaccccagaacagagcagagccacctcctatagacgcccattgccctgctgctgtacacttcagcagcttgcacaagggagctcacttaaaaggagaaattgtgtagttttaaaatatattttgtgtaaaataccttactatgctataaaccaccattaaaaaccagtgttttgatttggtacttaaatatttttggagtgaaaattatcactaaagtaacatgactccaacaaaagtatggtttcattataaaagagtactgtattgatttgcccaagttttgtaacttagtaaaggtattaacttccttggatttgtactttgtgatttagtatgctgtatcgtgggctggttatgttaactgaaaaaaataaagtcattacctgagttttgcagtgctctaacttaaacagaagaacagctgttcacatcttttagcattttacatttgcctaacttaaaaattgccatgtgtcaaaatcatggttttgtaattgctaaggcatgatatgtcaggttatttgaatataattactttttgaagtaattgtgaccacaaaacatcttttttacatgaaggagctgtgtatcatttgaaattactcaaatgatgtcttgctctgaggcataaatcccaggtacttagtgtttttaataatatggtgccactgcaggatttgggggcggtggggaagaacaagcataatggtagggggaggcttggcctgaaactaaccactgagtgaattgcactgcaggttttacttaacgggaattccttatttgggatgtcaagagggcagctgcaaactgaaaaacaatccagtaaatgtactttgttttatgtattgtagcaggcaattaactactaaataatagctttgacatttgcaattgttgcatagagactatttttgctagaagatgattagctcttgcctttattttacagtgcttagtgtgataaacttctagtcatgtttcctatccaagagaccagttaatatatgtacataaaccacagaaatagtataacacactatttttaaattatcgttttcctacttaaattttgtttagcttaagacttcttaggacatttgtaaaagcaggttaaatttaataaggtttctgatttttttttgtaaccggagatagtttttacaagtgaaataacatttcagctaaataaaacatcgctaaataattgatatttgatgaaaatctgctttgtataatttctgtaaattatccttgttctgaaaaaggtgtaatgccctaatatttttaaatccttatcctttgattttttaaaaactgacctattgataaaactataaattttcattttccagtgcagttagttacctttttaaacataaatgcacaacaagcaaatgaatttaagagaactaaactggaataagtgttcataaatgaaacccttggactatttaataaagttgaaatgtgaattaaggaaaacttttgttaataaaaactttcttttaagtgatgtttttcctgattataatttctttttagtaattaaaggtgaagggcaaaggcttttttttctttatgagagaaacactttaattcctagactgtgagccttcactgcgttgggttagtttctctaaatcacaggctctgagatgagcattttcccggccgcctggcagttccctgtgcctccagtgggttttcctcacatttttcttcccatccattccgggcaacagtgacaactgttgccttaccctccgtcttgtcgcacatcggaagcaggtcctagaactacagaaaacgctagggggtcctccactgggtttccagggtttagtgtcactccgagaaagggggtgccctaagagcctttctaaatctcagctctcaggacacgcttgtctgtccacagatttaaaaaagccggcgccgtttccctgaagcgggcgcaaagccaggccctcggggcggccgtgcccgcgccgcctcgcgtcctcgcttcccgaaagcacgcggctcagtggtccttagcgagcggggacaccccggccttcttgcccccgtcgtccccgccggggtaatacggaaggtcgggggacacacgccccgggagctcttggagccaataggtgggcgcggccggccggcccgccccgggattggcacccgcagtccagaccgcgcgcgcccattggctcccggcgccggggggcttccgcggcagggcagcaggggccgtgctcaggggcggggccgggtaggaggcggtgattggcaggtccgcacgccccgcctcttccgcttctgtggtctgatcttcctgcggctgaaccgcccggctgagccgacattgccggcgtcttggcgattcggcccgacgagctccgctttcgctacagcatggtggcctactggagacaggctggactcaggtaggcccaggcctccagagggaagggcttcgcgagccggcccgcgcgcatcccggtgcccagaggtcatgcaggacacagagcagcggccccacgcgtgaccggggttgggccaagcctcgggcgtcgccgccaagatggcgtcgctgtgggcaaagcgctcaggcgggcgcggcctcgacctcgcgtgggagcgcgtctgtgtcctgcctcgcttcccgacggtgcggcccagcacccacagagtgcccctggacacctttgtgaatggcaggtttctcgagagagaggccagctcttatttagcaaacctttttcttctagaatggtgctggagccaggtggtgaaagtagtacagtcacatccacctcgggaaacaggagatttctctccacgtgaccgccgttagcagctttgacctttaatccagcatcgaggtggagccttttacaactttacacattttttttttaaacttttaagtcctgttgatttcaggtttccttatgtctaaaaggggtgaaagccataactgtcgagagcccctcacaaagatgagaggtggctcctggaaagctcaaatatggaacccacttgaggacatggtgtctcatagtggaaccgcaaaccattggtctagctgtcacatccgatttttttttacccgtgcacctgagtgagcagaagtaccttgctctaggtgacacaccttgttagttgactggatggtgtagcactttacattttgtgggtacactacagcggagcttcccgacttgctgaggtcaagccagcgaagtcttgtagaattggaaggatggaaggatgatagtcccagtagtagataccgtttattaggcaacctaccctgtgatccatactttttcacacttgtttttcctcctcccagctatcagcaggacaggtattattgtccttttattctgttgtttttttcaggtgagtgagtaaacgtgctgaaaaggttgaacagcctgaaggtcacccagttagtaagaatggaagcaggcattggaactcatacctctgagtccccaaaataaattctaaaacatgagaaaatagcacccctccccgcttcctgtttttcaaaagtgggaaaggtgatctgacatcttttggaaactacagtgttgatgggagtccatctaccaaacaggaagcaggttttacagttttgctagaattgatgatgttctctaagcacttttcagtttgatttagaaatcttcattaggaggttattttcagtggcagacttgtgagacagaattcagtattctcagagaagagtttaaataatttagaacgaattgttttaattcaaaatagttttctcttatgtatacctcattttccaagaataatataattaaagttttaaggagagaaatcgaggagagaattcatgattcatgttatagtctctaaacatttcagtctctttttttctatgctgtgggatttttaaaaacatttatgcatctttcattttgaattaatatacactaaagagaaaacacagtacaaagaagaaaaatcaaagatcatccatccaaacaccagttaatactttggtacatttttttctagttctttttctttgtatagatactttttggcattagtcatatttttaaatccaattctacaataaggtacaaccaaaccaaaataaaaagtacaggaagaaaagcgaaaacacagtaacagctgtctggctggaatattgataattaaccatataccttctctcattttctcccagctacatccgatactcccagatctgtgcaaaagcagtgagagatgcactgaagacagaattcaaagcaaatgctgagaagacttctggcagcaacgtaaaaattgtgaaagtaaagaaggaataatctgtaagttatggatttatttagaagaacagttgcatcttaagtttttggagcaccataaagatcaaaataattttagttttgggttctattcattttttagtcagtgtatttggaagttagttattgggatggtataatttaaagcatgcaggttatagaagtcccctggcctaataaaaagaaagtcttcttgggccctgacaagcagaagtaattggcacattgattttcagttcatttagcaatgcttaggtagagagccatcgtatttgaattaaacctgtttcatttgtctgcacaaatcaaataatttggaggatgaactccccacttgtataattgcaattggagttacataacagtccaagagcatgaaaaactacagttctttacatttttatttcccccacaaccactaatgttctcacaaatcactacttcccgaacataataactacaggcacaggcaagggtcctgctgttgtatcaagcaataaaatctgcaagaccccgcagcgaatactgttttgctaatttattatgctttcagagggtttggttcattttacttttccaaagatgttggtgatgtaaagttaaattctcgtgaaataaaaaggtctgtacagttgataagtgtagacttttgtgttccacattataaaagtggtttgatctctaaagtactttcttgacattgttatttcaaaagtaggcaaggcaaattatcagagagatgtttttcagatttaatttttcttgttttgcttttaaaaagcttcagacccataatagcacagaaatgtgataaatattaatcctttggcagcttatggttatgagcaattttacttattggaactgtctcccctaagcacttttcattttcattttgaattagtaaatattttattacaagtctggagatgcagtgttttgaatttagccctttttctaggggctctctgtctaatctcataattctgagtaatgagacctggttttatgttgggttgttttgttttaacagtaagctaacagaaaatcatttagcctcactcggctcagagctgccagactgcatctaatgctgagattttgcaaagtcctgggggtcaggaagtagtgtccgatccccttaaacaaagcattagcccctctctgttatgcccttcagggttacagaccccacctcattagcacaaggagatgttagtgtcttttaaaggcaaagtagtttctttattctgggagagtgtttacttttactcagcaggaaaatgcctgcttgactaagcctgtgtacttgaaccagcactttttacatctgagccacggcaatgtgaatgatagccacagttatacagttcactataaggaagttatttcttatattcatgttgagtttttaagaaaacacagagaactagccagcaacttgcattttctttttcctcctagaccctgactaaagcttgaaatgctacatttccaaggtgaagatgtgtgggcacatgttatggcagattgaaaaggatctcattccatgggaaaaaaaaaaatcctgtcttgttcataaattgacaatgtcaataaattgaaatatggttcactgttactcttgattttagtttgtgagactttttcattttctttaaaggaactgtctgcacagctgcatgattatggccatgtgaaccagggtttcttaaaagcaggggaagccagatttaatatttagtgaccaaagggatacagaaagcattttgaaaatgtctcaaaatagttgtttcatgacattaattggtgatcaaaattatctgctgtcattgaggcttcgtagtcccttatttttgaattgttgtcatgtcagaataatgacatggttatcagtaacaaatggaaataattattaaatactaaaagtgtagattagaagaagaaatactaaattgtacttgttttgtattgtgcacttaaagcctatagataagaacggttacagaatttaagcacaaagtgtttttcacattgttttgtaaatgaatctttatactctggtagcatttctcataggaaatgaggcaaagctattgaataacttgctcattgagttgatggccaaactgaaattaaaacctaggagttttgactgcaagtctgggacacggtgaccacaacagcagtttcgtggtatttccatagtgattcattcattcattatttagggatgaaaaattgttgcaagttatgtttttatctttctttgaaacttgaaagggcttgggcaagtaaaacaccattgcaaagttaactgcctgattttaactgtttttggagactggagaaataaatttgaactggaaattttgacacaccattctaggatcagttctcacatggtacttaagctcacaatgatttatcagggccactgtcagcaatgccgaggataagccgaaaagaacatctttgttctcggcttctgggaatgacttattgtcccgacacttgacctgtaggttttactgaattctcagcacagagcgagcagggaggcagagccaattgagtggaagagggtgcctctggaaaccagcaggttaggagcccttggagtcctccgcctcggagctgtcatcctgctgttggcaagttagggcacctcagttcagtgctgtggcccccaagattaaggtactaggaagtatcctccattacagggaacaggaataaatgaatcaaaaagctatcgggcctttttgacatgggacgaataaagtaactaataggcaaaggggctaaatgatttccagtcaagtaattagagataagtcatttattaaggaggcagatggggtattattggtatatagatggcatagtagattgctagtatattggtagattattggtatatagatggtatgttaaggaggcagatggggtattactggtatatagatggtatggtagattggtagtatattggcagattattggtatatggtatgttgaggcagatggggtattactggtatatagatggcatagtagattggtagtatattggtagattattggtatagagatggtatattattaaggaggcagatggggtaattagaggtgagacttagggacagggcttgtgatatggaaaggagtgaagtcactgagtaaaagacaagtttactgtcagcagagattcttagaggctcttttctccgtgattaaaaaaaaatcctaaaccagtagtataataaacttcctgcctccagcagtgctgggtagctggcaggatgactgtgcccagtgatgaggtgaccccagtcagaccaacttaatgagtatcccactaattagttggatgatgtttgaagctgtcagttaatctcttagttcacatcgttcttgtgagcaaagtgaaggaatcggataagctctaaatttcggtgatgctgctgctctgagagaccaaggtcgctggagcaaccgtactgctaaaggataagctcttcaaaatcaaaagggacagatttcttaagtttctagtttgttttgtgtttttacatctatttctaccatacgaaagagtaggatggtgagatgcatttctaaatatttttaactactcagtctggatggttaggcttcaagaaaaggaatttatttagtctgaaataaagcaattttgccatttaaaattgaattactttgtagtttaatgattactattgagcaaacaaatctttacagtaatataagtcagcaaaagttttttaaaaggtttaaatccctccttccttacatctatttcattgcttttttaggtttgggaagtaaagcaccagaggaagcatgtgtaaatccttgtataatcgcaggctgtaagtctttagcatctcaggaagttactaacttcaaactaagtatataggtagagtttcttactaaatctagtgcttcttgaaccacaagtagaaagcatttaaaacatgaatgttgttttgtgttttttgaagtttgtaaatagaagacttgttgatgatccgatggcaaggtatttttctcttggtatgtattttagttatttcctcgtgatgcataagtgaaaagagtgaagtttctcagaatgagcaactgtcatccatctacctgctattttattattgctgattacaaaagcaaatcaagagatgagaacccagttgcctgcaagtaaatatttactgcattgagggtcggagcattttcccattaccggttatccatggatcaaatagtgtatctcagtggtaattctagagggccattaaaaccctgatggtgctggaagagatggcagtgctgcatgtcagaaataggtaaactgtaattaagaagttacagatgatttgattacgctcttgtgtatttggtcctgttataatgtgagcagattaaaatcatgtagtgcttaaagctatgtcattatgcaaacatttatggcaacttctgcaaattaatttgaactgtaaaagttccctaatgagacgatgtcctccataactgagaaggacactgcagccattgctgcttaattcctgcatttgaatggttgccgagcgcatggtgtgccctttctcaaagagcagagaggctgcagagcattttggggggtgatgactgaatgaaagtgaaaagaccatttcaaaatagcctttaaaaggaaagccaaggatgattattaatgaattcctgggatctaacagtagtaagaaatttaaactatataaacatatatgttaaaggctagctcttcagaaataaagatcagaagactgcagttctttagttttgcttgtctttttgtttttcttgtttggaccaggtatttttgtggagaggactgtggcttttcttttttcctcttttccagttagcatgttgtatgcacaggtctacacaacatggatatttctagtggatgttgactcacattgaccttggctctgtagctccccatgtactagtcaggcacctggctcttctggaggctggcaggcactggaaagcaggatgccagtcagtgtttgctcagaggaaagaacctaaggaaagagtcttagtagccctcggataccaagtgaggattccagggtgcctatcagtgctgctaaagtataaaaatgtaacaccaactccagtggctccctgcaaatccacacgtgtagtctggatgcctggcaaacactttgaaacaaagggagcactttacaataaatttgctatttttttaagttaataagtatgcactgaacatcaaactcttcaaggttagtagatgtcagcaaagaccctaatgcctgtcagctgctccccacctgtctccctcagtccctgtgtcgaagctaatggtgagtgcatatcattcactgtgctgcagtgcagagtgggttttggagtgctgcaggagaaacactcatctaatgagaaactgttctgtaagcgactccgcggcacagcttctctcacagttaatgtcccttatcttctggctccatttctgcctcctccgtgacctcttcatcttcctctagaactgctttggcatcttgaaattgttggtactcggataccaaatcatggatgttattttcagcttccccaaattcgtttatgtccatcccttcgctggtgtaccagtgcacaaaagctttccttttgaacatggctgagaaatgctcagagaccctattaaagatctcttggatggccgtgttgttgccaatgaaggtggcggccatgctcagcccccggggcgggatgtcgcagacagccaccttgacgttgttgggaatccactccacaaagcagctgctgttcctggtctgcacggagagcagttgctggtccacttccttggtggacatcttgccccggaaaatgcaggccactgtgaggtagcggccacggcggaggtcacaggcagccatggtattgcgggcatcgaacatctgctgggtgagctcggccacggagagggctcggtactgctggctgccctgggccgtgagtggggcaaagccgggcataaagaagtgcaggcgggggaaggggaccatgttcaccgccagcttgcgcaggtctgcgttgagctgacccgggaaccggagggaggtggttatgccgctcatggtcaaggacactaggtggttgagatccccataggtgggtgtcgtcagcttcagggtacggaagcagatgtcatagagggcctcattgtcaatgcagaaacaggcatctgcattctcaatcagctggtggatagacagaaccgcgttgtagggctccaccacagtgtccgacaccttgggagaaggcatgacgctgaaggaattcatgatccggtccgggtactcctctctaatcttgttcatgagcagagtgcccatcccggagcctgtgcccccgcccagggagtggacgatctggaagccctgcaggcagtcacagctctcactctcgtgcctcaccacctctaggacattctcgatcagctcggctccctccgtgtagtggcctttggcccagttgttgccagccccagagttacctgtggccaaaaagagaaaccagcaggggaagaaaggtgaaaagagaagggcaccagtaaagcatccccccctcctcctggtggaaccttctggaaaaacataccatggacaaaactgtcgggttgaaagagagctcctaatttgctagatcgaatgctgtccatcgtcccaggttctaggtccaccaagactgctcggggcacatatttcctacctgtgtagaaaaataggaaaaagtcagcctacttgtttttctaaaagttaatgttttatcaaaatagaactttgtgatactggtccaaaaaaaatcatggatattctagaaaggggcccttggtaggtcgagatttgagtatctaacatcatattttttaccccaacaacaatcccacaaatctatagaatacccagaaacaatctccatcagtctgctctgtgatattgccagtgacagagattctcttccttcatattggaaatgatcctggtttcatttgtgaaaccacaaaggaaagtgagtacttaacctgcttgtgttaaggtgtgtgccatatccagcagctccttccccattcctgcgtcttgaccagggcttggggacccaccactctaggatcctgctgccctgcctgtcgcctccctgagcatagacatcactgctttgacatttccatctcctgggcctctgcccttcctctgcttgtgttcccagttgcgggaccactgctcccagagccccgccagtcctaccgtaggcttcgttgtagtacacgctgattctctccagctgcaaggccgaggccccgcggtcgctcccagccaagtcgatcccgtgttcctcaccaatcatctcccagaactgaaagcaggaggaaggtcagagtaaacggaccccgaaaaaggctgtgttaaccacagagaaagttagcattcccaagcctgtttccctctggttgcctgaccctccccaagacattcttttagggccttttcataaataaccatggcatcattcgctttttgcctctactaagcaatgtgaagtaatatgaagattgcattttctccccacctgaactccttaaataaaatgtcaaacacaaagtactaaattggattttcctcctattaaattcatgccattatatacattaaagctgttgttttagaatttaatgtcaatatagctctaatttctccttataatgctccaagctagtaaagtgtagattccattaaaggaaaataaactgaattcttatctgatttcacagtaataactcatttcactttggggatttcttttcatgaacttttccaaacagcccataacttggacctctgtgcatgattttaagtaattagcgccttttttttttttttttttgatggagtcttatctgtgcagtggcgtgatctcggctcactgcaacctccgcctcctgggttcaagcgattctcctgcctcagcctcctgagtagctgggactacaggcacgcaccaccacgcccaactaatttttatatttttagtagacacggggtttcaccatgttggccaggatggtctctatctcttgaccttgtgatccaccctccttggccttccaaagtactggaattacaggcatgagccacagcacccggcctttctttcttttttttatttttttatgtttgtttgtttgtttgtttatttatttattttgagacagagtttcactcttgtcacctaggctggagtgccgtagcacaatcttggctcactgcaacttccacctcctgggttcaagcaattctcctgcctcagcctctcaagtagctgggattacaggcgtccaccaccatgcccagctaatttttgcatttttagtagagacagggttttgccatgttagccaggctggtctcaaactcctgacctcaggtgatgcacctgcctcggcctcccaaagtgctaggatcacaggcgtgagccactgtgcccggccagtaatgtgcatttttgattgtcaggtatacatacaactcacaattacacatagttgtcctctggtaactatttgaaacatactgcacttccagtcacatacacagtacttattaatatagatatgtgccaagctcttaatatggaaacagttactgggaagactccttttgatcaccctgaaaggcacatattaaaatgcaatgaaaatgtattcacatatattaaaatccccaagggtatgttaaaaaccccagccatatcttctaaatgacagtgctgctctggccatggtcttaataacaaggcagttcatggtaaactgccagcactgttcagggagtggaagaataaataaattcaagttctaagataccccaaattaaatgtgtcttaaagttcttatatctctaaatgatgagtcagccaggactctcaacgctagaccatacgattccagagtgagagctaaaaccctatctaaacctaacactttctcttgagggcccctttccgtattatcttccagcttcagagcagcagggctcctgcctcccacttctctgtgtgtgagttatgaatgtcttacccctgaggcatggaggaatggtgacttcttttcaagcagtaatgttccttgcccccggtttaaaacgcctgcatttaaaagccttagttgtttcctggcagcattactcacagtagccaaaaggcagaaacaacccaagtgtcattgatggatgatgaatgtaggtgtttcaaaacctcacttttaatgcatctcatattagtaaaagtaatttcacagcagcaaagagaacacgataaattttgcacggtgcaattggtcatcttaaaatcaagattggagattgtgggttcgggcatctgtgttcttggggttggccaattaagttacgtacttgggggaaatttttaagcaggggggcaagggaaagaaaaactcatttatattccagacagtgtattttaattaattatgttactgtacacaaaaaacttttattttcaattaaatttcttaaattttcaattgcatactaataaaacagtaattgattttttttaagcgttacaataaacatgagaggggaggggaaagacaccatagtgacagggtacagaaagtttctcaaaaaacttcaaaaagctgttttgagacaaattactgtttttagatatgaaaagttcattgttaagataaaagtgggccaggtacagtggctcacgcctataatcccagcacttcgggaggcccaggcgggcacatcacctgaggtcaggagttcgagaccagcctgaccaacatggtgaaaccccatctctactaaaaatacaaaattagccagacgtggtggcgcatgcctgtaatcccagctactggggaggctgaggcaggagaatcacttgaacccaggaggtggaggttgcagtgagccaagattgcgccattgcactccagcgtgggcaacaagagtgacactccatctcaaaaaaataaaagatgataaaagtgccaggcacggtggcctacacctgtcatctcaccactttggaagcctgaggcagaaggatcacttgagcccatgagttcaagaccagcctgagcaacaaagtgagatccctgtctctcaaaaaaaaatttaaaaattagccaggcatagtggtgcatgcctgtaatcccagctactcaggaggctgaggcaggagaatagcttgagcccaggaggttgaggctatagtgagccatgattctgccactctactccagcctgggcaacagagtgggcaaagaaaaagatgataaacgtattatgtaatataatggtcggcatgtattgtacatatgtatctatggataaaattaacattaattaaattaacactctaagcacttaatgtgtgttgtagctctttagttaaagattgtttccttcttttcccatgtgaaatttttttttaagaattaaagcccaaaggcattgtctgatatttagcaagtacattaaatctgctagacttattgtcttccctgctaacttagggtatttttttggttgtccgcctctatggactgtggtaaagctaggattagtaaccagacattacttaccttggctccgatctggttgccacactggccaatctgaatatggacaatttcacgcatccttgctctgagcccaagtctgagatcttcacggaatcctcagactctcagaatccagagcttcggttcactggtgtgagcccaacacaactgtggtcactgcagtggtgggactggccaaccaagctaccctcacaatgtgaccaagggtgtgtccaccccagaggcccagctccccgccctcagccagtcctgg

SEQ ID NO: 263 - DNA, 835 bp, Homo sapiens
cgtgctcgcgggagggtagcggcaaagggaggcctagtgattgcaggattccgggtctggggaggaagaaagtggtgggaaataggtgatgctcagaaaagggtgctgagggagaaggcgcggggccggggagtgtggttggcctattagaagtaaggattgatagggcctgggtggagatcagctgggagtgaaggggggacgggcttgggttttgaaggtgaaggtctctggagaactggggacacgtggatctggagtaagaggcacctactgaaaccggaagtggcctgagaaggttttatgtgaggtgtggacgggaggctattggactagaaggcattagttggtctgttaggacaaagtatacaagcagcaaacgcggtagatttatgtgtggtaggtgaaggctgtgaatcttttatgagtagttgagcaagaacagttgtctgattctgcggtgtcggagagtggagggtctcaggtagtgtcttggtcaggtttgaaggttaatttactgctagtggagggccaaatactccaaagagtttttaattctcactactggggctgatctcctcctacactccaccccgtcctgccatccctgtgacagttcatctcgttttgcctcagcagcacaagaactcactccctccgaagtaatggcatacatattgtttgcttttgactagatggcagtcaggaatcccttaattctttatgttaaaaaaaaaagtgttggtttaaagacaacatcagaagatactctcagaaaatctgccctccaggggagtttctcagctgtcatgttgggcatgtgtaatatagcata

SEQ ID NO: 264 - DNA, 836 bp, Homo sapiens
gcgtgctcgcgggagggtagcggcaaagggaggcctagtgattgcaggattccgggtctggggaggaagaaagtggtgggaaataggtgatgctcagaaaagggtgctgagggagaaggcgcggggccggggagtgtggttggcctattagaagtaaggattgatagggcctgggtggagatcagctgggagtgaaggggggacgggcttgggttttgaaggtgaaggtctctggagaactggggacacgtggatctggagtaagaggcacctactgaaaccggaaggtggctgagaaggttttatgtgaggtgtggacgggaggctattggactagaaggcattagttggtctgttaggacaaagtatacaagcagcaaacgcggtagatttatgtgtggtaggtgaaggctgtgaatcttttatgagtagttgagcaagaacagttgtctgattctgcggtgtcggagagtggagggtctcaggtagtgtcttggtcaggtttgaaggttaatttactgctagtggagggccaaatactcaaaagagtttttaattctcactactggggctgatcctcctcctacactccacccctcctgccatccctgtgacagttcatctcgttttgcctcagcagcacaagaactcactccctccgaagtaatggcatacatattgtttgcttttgactagatggcagtcaggaatcccttaattctttatgttaaaaaaaaaagtgttggtttaaagacaacatcagaagatactctcagaaaatctgccctccaggggagtttctcagctgtcatgttgggcatgtgtaatatagcata

SEQ ID NO: 265 - DNA, 348 bp, Homo sapiens
aagtgctgggattacaggcgttagctccgcgccggccaaaattattccataaatttatccataaaaattccacataaattttctggagtttgattatgtattaggcttgttgggaaatttattacccttgtgaagaattttgtagctaagtagcttgagggtttttttttttttttcactcaggaaagacatggtatgtatgcatcactgctattctatttgaagcttttggaatttttatttatggggtgtggatagaggctggaggcagagactgaggtcagagaagaggtagtagaaaagaaggtggcccactaccatatttccagtgtatttaaatgggagata

SEQ ID NO: 266 - DNA, 349 bp, Homo sapiens
aagtgctgggattacaggcgttagctgccgcgccggccaaaattattccataaatttatccataaaaattccacataaattttctggagtttgattatgtattaggcttgttgggaaatttattacccttgtgaagaattttgtagctaagtagcttgagggtttttttttttttttcactcaggaaagacatggtatgtatgcatcactgctattctatttgaagcttttggaatttttatttatggggtgtggatagaggctggaggcagagactgaggtcagagaagaggtagtagaaaagaaggtggcccactaccatatttccagtgtatttaaatgggagata

SEQ ID NO: 267 - DNA, 2359 bp, Homo sapiens
aaatttatctctgtaattctttattaaaaatactgctgtacacatagagactgaaaacaggattaaagatgaataacacaaattgggtcatgacattagaacctaacacactggtgctttttagggaagttgttgacatccaaatcacagaaccaaggtcaaaagcaaaatacaaaggtaccctcaaaaatatttacaatgaagtaaatacactaacagaatttaaaacaggtacaaaatattgaaatgaccaacgttacatgatttcaagggttgtcctttctgtgcttttatctgtcacgacaggaaggtgtggaaagtttatatccttaatttgactactcttggatattaaaatctttctattaattaaaaagacttttagacaacctcttaaatggaattacactatggaaaacagggctcccccaaaaacacctaggcagaactgagagttctttgaaaaccattcccaataaaaactaaatgaaaaataaatataaaacaaagcttaaaaaaatatgcattacctgacaccaaccttttctggctgacaatatttattcatgaaaacatatcagctgtctaccttttatatgcaaaccaagtcctgaggttaactaggggctgaagcaaactagcatttaggatgcaaacattcttggatttgtgatgtaaacttgccttgcacagggaagtttgctggtctatacagaatgagaaattcaagccctattttaacccctgccctctttagctttcacaaaacattggtccacaaattaaattttcaaaaagttcccagaccccaaaactaaaatagatgatcccctttcattttcaaagaaaacaatattggaaaaaatctccagcccgcttataaattaagcatttcatatttcttctagaatacaagtagttcttttttgtacaaaagaatacaatatgatttgtcaaaaaacatataaaaagacagctgctcttcctcaaatacatgagctaatgataaaagactttttcatgttaatgtctccaagttcttctttttacataaaaaagaacattatggtggcaaatgtgaattatccttttaatattgaacattatattcttttaaaatccatccagatcaaatgcaataattttctttttaactcaacaactgatgctaccaaacgtggactcaatatacttgttaaaacgtgtaaagcgtgtctctagtcttcaaagctttcaggtgaagagaggtgctttttcttgatgcaaatctcaaggcagagaaaatcattttaaagcttataaaaagtggacagagaaatattaaaaacttctctgaaatatacaaatatgtgtaattattaaaattgaagacagtaacatcagttgcaagtgcttggaagtctgtcctgaccttttgagtttccacattttcttcagttgcatggtgagcacccagtgctagtaaaacattcagtgctgggaaaggagatatagtcttcattactgttttttaagaaagaaaattcctatgtatttggcagtcttcagtatcaaagtataggtatttcatttactagaaattccatgaatacccaagtttggcgacaactgcatgtccaaatattaagaaagttaagaggaggaaaatcccaaacttttgagatggacttattcaggaatatcgcacagagtgagttattatcaaaagtactattactttgggctaagcagtgactgcaaaggcacagcagatcgttatccctccaaattcaggctgtaaaacatcagaaagctcttgataccagaccactgctgagtttagttcatcttctgaacagtgtctctgtgtctgtctccagtgtaaaggaccataataaagctgtggttcaaagagcaaaacttcataaacctcccccccgcccaaaaaaaaaaaaaaaaaaaaaaaaaaaaaccagcaaactggaaagaacctaaagtaatacactcctgaactttaggcctttaacacaatttcttaattttctcctatttaaaaaatttgcataaatgtaaatgtatctgactagcaggcaaatgtctttttaaaaaggctctagttgaatttgaaggaaagagctatacatgctccttcagttactgtttatctgatctttattcagaaaggatttaaatcaactaacagggaattcatatccaacaattcactggtattttcttggtatgttcttaagaacaaaacaaaacaaaaatctcaatttgaactaacagtgggtggcatacagagagcttgcatacgatactcttacaagaattacgtactatactgaacttctatgaaattatttacctggtccgtaat

SEQ ID NO: 268 - DNA, 4857 bp, Homo sapiens
gtgcttttttagcaaatactacaactgaccatttgcagctgcaatcagttcttgaaaagtattttcaaagcagcgctttaagtcactgtaggtcaccacaagtacactcttctcatctctggaaatcaggcttattttttctggcacaccagcatctagctgaaacaatatatacacaaaatatgaaattcataacatgcagaaaagaatttatctacgtttgcagcaaaaataaataaaatatctaaattttttttgtcacattccctttcagatatccatgagtacatttatatcattcatcagtatgcacataattttcgactcagacatttttacacaaacactgccctatgtttctatcccttcacgcttaacgtttgtttgtattatagtttacccagttgatgctccataatttttctcccagtatcttccatttttggcataataaattacagtgcaatgaacatactcatctacttaatttttttcttctgtgggaagtactttttccttaggaaaaatacttagaagtataaatattaataataaaatgtaaagtattaagaaattggtttttaaaaaattttaaaaaaacacaaaaaagtaaagtagaagtggttttatagcttagtacatagaaccaaattgttttccaatcagacaccatgaatttataagtttttatttttatttatttaatttttggggatggagtttcgctcgttgcccagggtggagtgcaatggcgcaatcttggctcactgcaacctctgcctcccgggttcaagcaattctcctgcctcaacctcccgagtagctgggattataggcacctgccaccacgcccagctaatattttgtattttaagtagagacggggtttcgccatgttggccaggctggtctcgaactcctgacctcaggcgatccacccgcctcggcctcccaaagtactgggattacaggtgtgagccaccgtgcccagcctaatttataagattttaatacttttccagcaaccccacagcaaatgagcaccttgctatttaaatttagattttaactactattatcaaagttttttcatacatttacttttggtatttctgcttgtgtaaatgctagtatatgatctttactcatgaccctaatggaatttggcagtaatattttagtgaggtctttgtaaagcataaatactgatccttagtctatcaacttgtcttgttatggttttcactttatttttgttattttcaatgtactttatttcattaattgatacataattcattaaaatatgtttacaactcactgaaggctcaaacattcaaatcatttaccagacaatttctgtcattatttctaccaaaataagcttatataaaatcttaattttgtataatcaatctggccatccttcccttttaatttatcacactcttttcaaacttagaatattgtcacacttcagatttggggtattatttactactagctagttcatgatgtgaaacagaattttcttcaaattttcaattatcctaatattcattaaatgatctttgatgaatttaatattatcctaatattcattaaatgatctttgcttaaggcaactgtccatggcttattccatattacctacttgtcaatgtttgttctggttctacgtatttttaactactggtactctgatactatgctctaaaatctgacagaattattttctacatattgctctcaagaaaaggtttttcccctaacataaataaagggaaaataaatatataactcatactgaattagttcaatgatacatatagtcttgtgcagtcttttttctttttttgatacagagttttgctcttgttgcccaggctggagtacaatggcacaatctcggctcactgcaacctctgcctcctggggttcaaatgattctcctgcctcagcctccgaagtagctgggattacaggcatgtaccaccacgcccggctaattttgtatttttagtagagatggggtttctccacattggccaggctggtctcaaactcccgacctcaggtgatccgtgcacctgggcctcccaaagtgctgggattacaggcgtgagacaccgagcctggccagttttgtgcagtcttaatgtaggttattgacaatactccttatagagttttaaggaagttaaaggaaggcaaagtagtgcttaaaaacaaaccgtaacattttccctgaaaggttaccacactgtacattaatagttctaaatcatgtgctacagtagatattttttcctctagtacttataatttaggaaagtttagaccaagagtcagtaaatgttttctataaagggtcagacggtaaatgttttaggtttggcttattgtttattttacaactctttaaaaatgtaaaactattcgaggctctcacgctttaaaaaaataggccatagaacggatttggcctgcaggccatggcttaccagctcctggtttatacataaacctatacagagactacatttactcctggagaccagttctaaacttcataatgccaagtaattcataagggaactgtcttctttcttttctctgtaaattttgtctttcccaatcttttctttcttttttttttgagacggagtctcgctctatcggccagactggagtgcagtggcccaatctcggctcactgcaaactccgcctcccgggttcacgccattctcctgtctcagcctcccgagtagctgggactactggtgcctgtcaccatgcccggctaacttttttaattttttagtagggacggggtttcaccgtgttagccaggatggtctcgatctcctgacctcgtgatccgcccgccgtggcctcccaaagtgctgggattacaggcgcgagctactgcgcctagccttttcccaaccttttctaaaacataatgctgctgggcgtggtggctcacggctattatcccaacactttgggggtgggtggactgcttaatctcaggagtttgggaccagcctgagcaacatggtgaaatcccgtatcgaccaaaaggacaaaaattagctgggtgtggtggcgtgtgcctgtggtcccagctattcaggagactgaggtgggaaggaggaccactgcagccctggggagtcaaggctgcagtgagccataagtgcgactgcactatagcctgggtgacagatcaaaaccccgttccaaaaaaaagctcacctcacctctcaaataaatttatgatctattttttatctacttaattcatctaatcatcaaattcaccatttataacagctggacctgctagtaactgatgtcactagtattgtgcttttattatttactacttgattataaaacctagagttaggccgggtgcggtggctcatgcctgtaatcccagcactttgggaggctgaggcgggtggatcacgaggtcaggagatcgagaccatcctggctaacatggtgaaatcctgtctctactaaaaatacaaaaaattagccgggcatggtggtgggtgcctgtagtcccagctacttgggaggctgaggcaggagaatggcgtgaacccgggaggcggagcttgcagtgagcctagatggcgccactgcactccagcctgggtgacagagactccgtctcaaaaaaaaaaaaaaaaaaaatctatagttaataatgatttgataacacccaacataactcacaatgattcggaaggggttcaatttttaaaaaataaacacaaaattatttttttgctttttaccattcactgttttaagcggcataacaaaaccacatgtaaataaaacattgcataaaggagggaagcagtcattttgtgatactttatcataataaaaagatccacaataaaacattctaaaattattcatgaaggccaggcgcagtggctcacgcctataatcctaccactttgggaggctgaggcaggcgaatcacttgaagtgaggagttcgagaccagcctggccaacatggtgaaaccttgtcgctactaaagattagctgcgcatggtgatgggtgcctgtaatcctagctactcgggaggctcaggcaggagaatcacttgaacccgggaggcagaggttgcagtgagccaaaatcaggccactgcactccagcctgggcaacagagcaagactctgtcctccactgccccaaaaaattattcatgcaagtattgtaaaaatcctcccattgtagaaaatgttattaataaaacgtcttacaggctactttaagagtacatcctgatttcttaagtttcctagtatttgtagaagatacaactctatacaaattataggcagaattatgatcttaaaaaatctagatacaaattaccttgttaagacaagaaattatatgactgaggtcaatccagggagcacctgcttctgtcacctgatgaaaaagatgatccctaaagagtttcaacagataacggtctccagtctctgaccaagtgggatccttctgaaacctgggggaaatgaacattttacctcagtaactcatgctgtatggtctgtggccatatgtctattttttagactccaaactagttttactttttcccaataaacaaaaaattgggagggagtctggtacagtgtttttaaaaaataatctaactgaactagtaagtctatgaattccagttttcagttagcaaatgtcagggggaaatcatcccttatgcattcctattttacattacctccttatttcagcccctaccattagataaaatggaaaaggtaaaaatatctttaaatatctt

SEQ ID NO: 269 - DNA, 1300 bp, Homo sapiens
acaaacaaaaaaaaacaaacaaaaaccctataaacataccaattacagtacctgcaaatgaaggttaagtgttaccaaattaataaatataattaattactgtttatttgctttagaaaataattggccatgaagccagaggaccatatctatcttgttcattgttgtattcccagcccctagcattgtgcctgagacatcacagatcccctttaaatacttgctgagtgaattcactttttaaataacagccacatttcatccttttgatctctccaaacttgatttagatgcaacttctccaggagtgcttatgttacccaaagagaaacagatgcacaaagagaaggaatgagatgctcggggatattttatcaaggaaaccagcaaaccgtctttttcctgaagaccttttaagattaggacaagcagctgtttataaaagcagaacagtgttaagatttgaactgtaaagtaggatcatgctttgaagtatattctagctaaaagcaggggataaactagataaaacttggagactctaagacctgaccctgattaagtgggcctacaagtgagaatctgaagaacagctctctggctgaacatatcccttggatgttgttattaccagctgcctctagatttgagaacagtgctgagcatgcttttaaatgatctttgaggtactttaagctagctacacctgaaagcatacctagccctcatttctgtttgcttgaacaagagcctgaaaaagaagtctaaagaactttctagtgatatccttcagtcctgttctaaaaagaacctgtgttcttcaccgagttaaggaaatttcacaactcccaggggctaatgtggagttcattttcacttactgctgaatcaactgaagttcctttcagagtcttttcctagagtggaaaagtatctgagctcttcaacctactattcattagtgctgagagacaaaaatcatgttagagtctataatgtaatggagcataaaacatttaagttatgaatctgcataaaatgtgtaaaagatgaaaaaacatactttaatgtttgtcagtacttattgatcagtgaaagaacattttcattaatgcctcagcctgtgaatggatgtcaataaagatgagtgagaaggtatttcatatacacacacttgttcaatatttattatatgtttattattcataatgtattattatttatacgggaataataatctcttctgtagccaacacagcacctaccctagtatacatacatggtgtaagtatttaaatat

SEQ ID NO: 270 - DNA, 89 bp, Homo sapiens
tgagacggagtctcgctctgtcgcccaggctggagtgcagtggagcgatctcctctcactgcaagctctgcctcctgggttcatgccat

SEQ ID NO: 271 - DNA, 1227 bp, Homo sapiens
ctggagtagaaaatctttcacacataaaacttcaccattagctaagataaattcctttttgtgtggaataacatgattgtaaatataaactgcatttcacaaataacatggatttgaaatacttctcaatgtttgagtcatttacaaactgtgtaaactgagacctggagaccatctaaatcaaaatcctgagtggaacagtattcaaggtaggctttggggacagttcccccaaatgttacactgtttcagtagtgttggtacccatctataatacaaattgttttaaaaataagttttattgtgtatatatcaggtatattacatgatgttatgggacacatatagatagtcaaaatggttactatagtgaagcaaataaacatttccatcatttcacatagttacccttttttgtgtgtttggcatataatacaaatttttcattttgtgtatgttcacatggaattattaagggagaaggaaatgtcaaggaagaagaaattgtgacttaaaattcaatttgggttctatattactgtgccatcaaaaatacttaagatgatccttttaggtgttcacaaatgtttgactggattcaatagcagtggtaattctttgaagaaatacttaattgaggccaggcacagtggctcctgcctgtaatcccagtacttcgggaagctgagacaggaggattacttgagaccaggagctcatgaccagcctgggcaacataggaagacctccgtctctacaaaaaaattaaaaaattagccaggcatggtgatacatgcttgtagtcccccagctacttgggaagcttaggcgggaggattgtttgagcccaggagtttaaggctgcattgagctgtgatcatgccactgcactccagcctgggtaacagagtgagactctcaaaagaaatacttggcgggggtggtggctctgtaatcctagcactttgggaggccgaggcgggcggatcacgaggtcaggagatcgagaccatcttggctaacatggtgaaaacctgtctctactaaaaattcagaaacaaaattagccaggtgtggtggcaggcgccggtagtcccagctatgccggaggctgaggcaggagaatggcgtgaacccgggaggcggagcttgctgggagccaagatcgtgccactgcactccatcctgggcaacagagtgagactctgtctcaaaaaaaaaaaaaaa

SEQ ID NO: 272 - DNA, 6398 bp, Homo sapiens
agtggtgagacacatccagtggacgcccagggagatggaggtgtacatcaggcacttggagaaggtgttaaggcgctatgtccagaggctgcagtggctgctgtccggtgagcctgcccactgccctgaagggtggaggagcatgaggggatgtagaaggctagccccagggaccccagtgtcagtccttccaaagccaggccttcaagaactgcagatcagaggattaggccaggaacatcatccacatacaacatgacactgggaggccgggcgtggtggctcatgcctgtaatctctgcactttgggaggccaaggtgggtggatcaccagtcagtagttcgaaaccagcctggccaacatgatgaaacccgtctctactaaaaatacaaaaaattagccaggcatggtggcgggcacctgtaatcccagctactcaggaggctgaggcaggaaaatcgcagaggttgcagtgagctgagatcgcgccactgcactccatcctgggcaacaagagtgaaactctatccaaaaaaaaaaaaaatgacagtgggttcagaggacaggcaaggggctggataacagggaggtggaacatgggccaaagagccccagcgggagctcacacgcatcccagcctgctctgcaaggccacctgccacaccttgccttcctgcaagtgacaaggggctcactgtcaaaaggtttgctttaatattgactgcgccccagcaaaacagcccctggagatgcagatggtaaggggaactgacagagcagaaaccctctgttttgttttgttttagaaacagggtctttctctgtcacctagtctggagtccagtggtgcagtcatggcttactgcagccttgaactgggcacaagcaatcctcccacctcaaccttgcaaggacctgagactacaggcacgtgccaccatgcccagcttactttatttattttttttagatacagagtctttctatgttgcacaggctggccccgaactcctaggctcaagctatcctcctgcctcagcctcccaaagtcctggggttataggtgtgagctactgtgtacctctttacagagagcaccaagtcccctccaggagaggtgaatggacagggttgggctgtggattaagagacggtctggaagcatcaagcccaagaagacaggcagacagctagaactggacaggaggggattcgggctatggggcctggagggtttctggggcatcaggaggagggaggaagggagtcctatatagagatcctacaggtggctttgtacgtgccactcagggtcctgtgtaaattcattaggtccagtcctctgcagtaggacctggtatagacagtccatggacaggggcgtcatgatgactgctgcttcaggtacagttgtcaggtcagaggctgagctgggacagagaaggcgtgagcctctctccaccctcggttcacattacccctgggaacggtgacataaaaccagagatccagcgatttcttttgtagtatgaatcccccagctcacataccagtacacacccaaacaccatctaatattttaaaacaatgtcatggtactatttaatccaatcacttaactttaaggataaggaaattcaagcccaggaggttataaccgcttgtgcaactcatcacagacaaagccagagctgaaatctcgatctcccaaagcccaaaccactgaccaggtctgtccttggacaatcgacccctcccacagcaccacaaaagccgtctctcagtggggtgacatccaatcaatgatcaggcaggcaacaggtgtcacaagactttatacttgatagatagagtgagggaaaccacccaggaggagggacccctcactccctccctgcctcttccccacctgtctcggagcagggagccgccgactgtttggcaccgttttggagagcaaagtatgcatattgctggacacgtcagggtccatgggcccctacctgcagcaggtgaagacagagctggttttgctgatttgggaacagctgcggaagtgctgtgacaggtaggaggcgagggctgatcaggaagatcaaaggggcagttcctggggcttccctggccaagcacgccccctcttctcagtgccaacaggcctggagtttctgagatgctcttctgagtaacgcgtttgagtaggaaagagcactgtattctgctctgctgtgaaggaaatcagtttttagaggccgggtatggtggctcatacctgtaatcccagcaattttgggggccaaggcaggaggatcacttgagctcaggaattcaagaccagtctcagcaacaaagtgtcatcccatctcttcaaaacatttaaaaattagctgggtatggtggtgtgcacctgtagccccaactacttgggaggctgagaagggaggatcacttgagcccaggaggttgaggctgcagtgagctatgattgcaccagtgcactcctgcctgggcaacagagtaagaccctgtctcaaaaaaaaaaggaacgcaatttttaaaaattaatttcaggcctagggacaattgcaagcacagcaaaggaactaccatgtggccttgaagtatggctttcagctgaacttgatttgttttaaattatttaatgatttaatttttttaatttttgtgaacttgatttttgagtggaggaagttgtttattttccccatccagaagggttgacccgaaggggaccccaggggactctcatcgtagactaggcctcgttcttgccttaatcagagtatacatttattgagcactttctgtgcaccagatgctttacacgcatcatttcatcaactctcacaatgagcccgtgaggtgttgctgttatcggcccccatttttcagaaaaggaagccaggacttcaagaggttaagacacttgctgaagatcgggtaaccagtcactggctgagataggattgtttgggttgtttgtttgcttgtttgttttgagacggggtctcactctgtctcccaggctggagtgcagtggtgtgatcatagctcgctgcagcctcaacgtcctgggctcaagtgatctcccacctcagcctcccaagtagcttggactacaggcgcacaccaccatgcctggctaattttttaaaaatctttttcgtagagatgggggtctcactatgttgcccaggctggtcttgaactcctggcctcaagcaatcctcccagcttggccttccaaagtactgggattacaggcacaggccactgtgtctggcttgggctgggatttaaatctatttctgtctgcattcaaattgtcagtgtgtaccctctcattctcaagaggccccacagccctctccctgaggggccacagggctcgttgtaggggtcttcagtgacgagcaagaatagtcctcatgagggtaacttatctgaattcaatctagacaggcctgttctaaccaatctctttctccccttctctgcccctcacctcctcttttcctcctccccagttttaacctgctcagctttgcagagagctttcagtcatggcaggacacgctggtggagaccacagatgcagcgtgtcatgaggctatgcaatgggtgacccacctgcaagctcagggcagcacctccatcttgcaagcattgctggcaagtcccaccacggagcccgaccttgacgcaaaacaaataccatcatcccctatgctgatgctgcacgatgctttaggatttacaaagggcgctttataatttacaaagcactacatcatttcatcttcccaacacccgagtgagaaaaggattctcaatgttctcacattatagatgaagacacaggctgggtgcggtggctcacacctgtaatcccagcactttgggagggcaaggcaggtggatcacctgaggtcaggagttcaagaccatcctgaccaacatggtgaaaccccgtctctactaaatacaaaagattagccgggcgtggtggcacatgcctgtaatcccaactacttgggaggatgaagcaggagaattgcttgaacctgggaggcagaggttgcagtgagccgagattgcaccattgcactccagcctgggcaacaagaacgaaactccatctcaaaaaaataaaaattaaaaaaaatagatgaagacacagaggctcagagaggttaagtgacttgcttgggattaaccagctaggcagtgaaccatgctatttctcctaaacctcagcagcttccttagtctgtctgaggctgaaagagaatctcagtctttttgaacaggtcagtggcatccaatcagatgcattttggcagaggcggcagcaggcactacctttaggcatttggttcttgtgttctgggtgagcctctcccctgagcctgacagccttcctgcgttctttcagaaagctttcagtttccatgatctggaaggattgtacctcctgaccgacggaaagccagacacaagctgcagccttgtcctaaatgaagtccaaaaactcagggagaaaagagatgtgaaagtgcacaccatttccttgaactgctcagacaggtgcgcaatatggagtctgactgagttttattctttttccacagccacacatctcagcagggagatccaagcccctcacctaatctagctgctcacttagacacgggtttctcctgggccctaatcctgtaaatcagaaattaggagaagcggccgggcatgctggctcacgcctgtaatcccagcattttgggaggttgaggcaggtggatcacttgaggtcaggagttcaagaccagtctggccaacatggtgaaaccctgtctctactaaaaatacaaaaattagacaggtgtggtggtaggcgcctgtaatcccagctactcaggagactgagacgtgagaatcacttgatccagggaggcagaggttgcagtcagcggaggttgcaccatggcactctagcctgggcaacagagtgagactgtcaaaaaaaaaaaaaaagaaagaaaagaaagaagttaggagaagcattgtttttctagacggcccaagccggtgtcacaccacagggtgaaaacccctctctttacccagatatttccctctgacttcctccagcctggaaacacatttgcaagggattcacacagtcattttacagtctccctcctactcttccctgggatcacatttgtgaatatttaggggacatttaggggaaaagccagagagaaaaatattaatgtagcattgtcatggttatttttttttataaacgatcactatagaccatgtgctatgaccgggcacaatggctcatgcctataatcccagtgctttgggagactgaggtgggaggatcacttgaggccaggagttcgagaccagcctggatatcatagcaagattccatctctacaaaacaaaataaaaatgtgaaaaagaacacatgtcagataagacatactcagctccttcaaaaaaaaaaaaactttattattagcaaaacagactgcatagggacacattttatctcttggtctaaaccatgagccccataagtgtaatatgtgtgtcctttacaggcctaacacatagtaggcactggataaatgtcccataaataaatgggggctaggctgagcacgacggctcatgactgtaatcccagcactttgggaggccaaggcaggcagatcacctgaggtcaggagttcgagaccagcctggccaacatggcgaaaccccgtctcaactaaaaacatacaaaaatgagccgggcgtggtggcaggtgcctgtagtcccagctactcaggaggctgaggcaggggaatcgcttgaacctgggaggctgaggttgcagtgagccaagattgtgccactgcactccagcctgggtgacagactgagactctgtctcagaaaagaaaagaaatgggggctggagtgtgtgggctgtgtggtttcagggggtccaggctaaatggtgacactcacacggggactcctcttccctcaagcagcagcagttgctatagctgtccagaagctggtggggaaagtgtcctctaatggtggtctccatgggacaagccacggcccattgccaggctgatttctcttaagccccacggacttaagttccccatggacgtggggagtcacacgaacttgcctggtcagtcagccttcccaccagccctctgtcccttccttccagagcggcggttgagttcctgagaaagctggcttccttcaccggcggacgctatcactgccctgtgggtgaggacacactctccaaaattcacagcctgctgaccaaaggcttcatcaatgaaaagg

SEQ ID NO: 273 - DNA, 6398 bp, Homo sapiens; identical to SEQ ID NO: 272

SEQ ID NO: 274 - DNA, 734 bp, Homo sapiens
aaatggtcgatcaaaaggaaccaactatattgagcaccatgcgtgatcatctgatcgttactgctaccttgtgagttaaaggctactcttctcattttagaaatgagaaaagagatgcccagagaggacgagtaacttgccttaggtcacacagcttatattaatcacaataacatttgccgcaccttctgtattttttttaagttgctaagcttttggtgcatgtctggcaccgttttagttgtatattatttcatttaattgttaaaatgaccttctgatgcaggtatttgtagctttgccattccacagatgaagaaacagatgaaaggactgaattgttcaataggaaggagcagaatcaggatatgaacttgggttggcctgattcttggggctgcattctttccataacataattgcttgctgtgatgtcctgggctactctgccaggggtggttagtggagtgaatggagaataatttagacaaggtcagtaactcccatgccatctagaaattaaaagtttaaaaggcagagtctgcaactctccttgatttctacagaaataaagatgatccctcctgtgacagtgctaagtgacaattctgagtgtaaatgcgctttttggcacaaattgtcctgtcctaatagtcttgattataattataaaataatgggtttctgaaaggctgcaagcagttctgggaatggcaataaaggtttagaaatga

SEQ ID NO: 275 - DNA, 814 bp, Homo sapiens
taaaatattctcccagttttcgtgcacagacagatttgggaattactgttataatggaaaatggagaataaccacccacatttaatatggttattggttttgttcttgagatttattgctaagattcatgatagcccaggcaaggtcagataatgtatttttattttacactgtatagttgattcttctcaatcccactagatcagactctttgggatactaggattggcctatttgatggtgagctcactacatccatttagatgttgtgtccatgcaatcattttagttctcctagtttctacctatcacgttgtcattttcccttctttatcatcctgggtagctgagaccccacataaatatataccagaaaaatgttgtggtcttttctaaactctctgaggcatctgttgtcaatgtgatgttgttttttgtttccagtccaaaatatatcaaagtaaaatttaactccacttttgctaagtattcatcttgccttgagtactaagattccaaaaatgactttcccctctgaaaaacacaggatttccttgcgaaaacttgctgggccactgccaatcttcccagaaactcctttttccttatcgttgaggggaattggggaagtgatcactgacggttgaaattcagtagttttggtctttaagctgagaccctgagtcttctgaggagtctactgctccccagtgggaaacacctgctgtcaaaattttcctgcttgcaaagagcacttttgaaattaatggcaggggatgaatatctggctagtgctgtgctcagctgagttatt

SEQ ID NO: 276 - DNA, 2505 bp, Homo sapiens
cctgggtgtgtttccatgtctcatgtactagtgaaagtagatgtgtgcatttgtgcacatatccctatgtatccctatcagggctgtgtgtatttgaaagtgtgtgtgtccgcatgatcatatctgtatagaagagagtgtgattatatttcttgaagaatacatccatttgaaatggatgtctatggctgtttgagatgagttctctactcttgtgcttgtacagtagtctccccttatcccttatgcttggtggatacgttcttagaccccaagtggatctctgagaccgcagatggtaccaaacctcatatatgcaatattttttcctatacataaatacctaagataaagttcatcttctgaattaggcacagtaagagattaacaataactaacaataaaattgaatagttataataatatattgtaataaaagttatgtgaatgtgatctctttctttctctctctcaaaatatcttactgtactgtactcacctattttcagaccataactgaccatgaaacctgggaaagtgaaactgtggataagtgaggaactaacatacatacatgattgtttatctacagatgtatgcctcagtttcttagtatgcttgaaaatgtatgattttgtgtatatccgtgctacatgtaagtgtggttctattcatatttgaatatgaattctgcataagtgtgtttattcaagcaaatgtacaaggctctgagaaggaagatcaacatacaacttggaatatttcaaggccgaaatattcaaggctgacattggcctccttcctatcagttccctctcccagatggaaattctagaaatggcaggtgaggtggacaagcagggaaagaaattatatgcatagaacagaaggagaagaaagagtaaagtcaggcctcagccagcctctttttagctctttaaatcctctggatttaagagggataaagggtggaataaggataaattaatgccaattgtaatgccttaaatttgtgtgataccttacaacttgaaacatattcacaaaactatatatttgaatatctcattagctgagtaaggtagcaaatcataattaactttttccattttattgatgggaaagctgaagttcaatgaagtaaatttttcaatagcccacagagtaggaaagtgacaaaacctgagcctgggcctccaggtcactcaaggacactttctttcttccacacccaattgcttcatgcttaaagttggcaaaacaggaagtgaaactcctgcagttttctgtgtggttgacactagcaagggtttctcagttgaagccatgaatcattaagccaatacatatgcatatatgttatacataccaaatgatttatttataaccctatctttccataaaggacttgaaggagcttcaaacaaaggatatgtgaacaatagggttaatcaataataagtagaaaatctggacatagaataaaaagaggagagaaagacaccgagaatgagcgttaatacagtgctttccatttttctggtgttttgagtagcgtggcttttggagaaagccaaaactcaaatcactccttatcaactgtgtgcctgggctccatttctctgagagtctacttagctccaatgtaaaataagaatagaactatgactttgtaaggttgctctaaggattgaaaatcatgtattatgttcaatacggggacactgtccttatgggtgagtactcccctaagactttattaagagggcactaggagaagcactgggaggtcttctcagtaacaacactaaagtaattgctatttttccagcctgtggaaccacagaagtgactgtaactaaaattagacatttctttctgattcattctctactcacgggattgtcagaccccagtcttcttctggactctataaactttttagaaatcatcagcaggctcctggagaagcttaaatgaactcacacaatatgtgacagtgaactccctgggagagtgaaaaccaaagtctaagccagtgtctccatttacttgtgtgattgtgggcaagtcattcaagtgctttgaggctcaggtcttaattcatgaaatggaggtaataataccttgttggcagacctcacttggttaaaatgataatgttgatagttacaatagttacatttaattgatcaattgttttatgcaagggctttatttgtgctatctcagtttgtcacatcaatgaattagaaaagatacgaaagtatttccaattttacaaatgaggagtctgagtctgggagtcattctgtcatgtgtccactgtcacctgctcattggtggcagcactgagattaggatctaagtccacttcaccgcagaagcagggcttctaaatactgttctatggcaagagcaccctgctctcacaaaatgcataaaacttcctatctcaccattataattttgactgatattaaacaaagagaagtattattatta

SEQ ID NO: 277 - DNA, 893 bp, Homo sapiens
aagaagaaacagtctcagggaaatttcttttttcttttttttttttaaagagaacaagaaaagtacaacattgcttaagtcctacctcatctttatttttttacagatgaatgtacttatcttttctgcagggattgagcctgtgaagtgataatttctatctacctcataaatctttacatttccttctgcaacaggccctcttcccctcctcagtggagtttgcatttccctcttcccctgcgtggggcatgatatgcacaagcctggcatctgtatggctgggagggcactggatgtgtgtggtggggtgtattctgtagattgagccaaggaaacacaaaaaaaaactactaagtaaaaaaacaaaaaactataaaacatggaaaaaataggatttgaaatgcataattatagaatacctgtgttcttgagaatactgtttatatggggtttagattatgttgtgttgttttgatctttttggaaaatcttctctttttaaatgctgcaacagagaaatttcctctgttctctgtttatacctcagtgtgtttaacatcctcttctgcatcgtttcttgatcttagacgttgtggctgtggcttgctagccaagaaaagcagacccttcatattttagggtatataatctttgtttcttttaagggagggtgtgtgcatgtttgtttcaaagccatcttgcacccaagtagtaaagctgaaaatgacacactgcctcccaaagaacctctccttttcacactttggtttcttaaaaaagtatatagatggtagctcaggatttttgattaaacatattctcaaaagttatgctttcttattttgctgttaggttataaagggttaaatggaaggaaaaaggaaattaac

SEQ ID NO: 278 - DNA, 278 bp, Homo sapiens
ctggttattcaccccgactgccagtcggcacgctttctgggctcggagggcacaggcaatgggcagttcctgcgcccacaaggggtagctgtggaccaggaagggcgcatcattgtggcggattccaggaaccatcgggtacagatgtttgaatccaacggcagcttcctgtgcaagtttggtgctcaaggcagcggctttgggcagatggaccgcccttccggcatcgccatcacccccgacggaatgatcgttgtggtggactttggcaacaatcg

SEQ ID NO: 279 - DNA, 472 bp, Homo sapiens
acaagctactctgtctcttcccattgctttaattctagggtttctgagtgaccaaaatgggaaggaaaaaaaaaacctcatctcacagaggagaactgcatgcaataaaagattcaaaagttggaaagtagcttcaaactgctgctggctcccagctgctgttacagggtgggaaggtgttaggaaatgttgtttgttagaagctccttttactgtagaatttaatagtgaatccttccccaatgcctattcagttgccttttggccgttaagctctaagttctttggtaaagagttaatataattaaacatttttactgttttctattttggagtaacttggtgctgatcttccttccctttccccagctgcccaacaagccaccctttaaacaccaaagacaactggttttaaatgcttgaaaaaaattttattgaggagatggatcttgattaaaatcttttcatcatc

SEQ ID NO: 280 - DNA, 756 bp, Homo sapiens
ctaatgctaatcttatcaagtgagaaaaaacccaaccagcatatgagtttttactgttttggaaagagttctctgttccttaaggagataattataatgaaaccatttatagttttatcatgctttacttccagaaaatgctttatactggtgacagtctgactcggccattctatgtgcctcaaaacagagtgcaggcggggcacggtggctcacacctgtaatcccagcactttgtgaggccaaggtgggcagatcacttgaggtcaggagttcaagaccagcctggccaacatggtgaaacactgtctctactaaaaatacaaaaattagctgggtgtgttggcgggcgcctgtaattccagctactcgggaggctgaggcaggagaattgcctgaacccaagaggtggaggttgcagtgagccaagattgagtgaaactccatctgaaaaaaaaagaaagactaaaataatagggcttagtctaccctaacttattctcatcttttaggagatttttgcagaactttaacaattatcagtatccctgacctcaatttgatgctgaaaagtatgctaggtagtagtaattttgaaagctatttgcttttttgtttggttgtaactcaaattagtaaaaatgaacatgggtttgccccggggggcagaggtttcagtgagccgtgatcgtgccactgcactccagcctgggtgacagagagagactctgtctaaaaaaaaaaaaaaaaaaaaaa

SEQ ID NO: 281 - DNA, 767 bp, Homo sapiens
ctaatgctaatcttatcaagtgagaaaaaacccaaccagcatatgagtttttactgttttggaaagagttctctgttccttaaggagataattataatgaaaccatttatagttttatcatgctttacttccagaaaatgctttatactggtgacagtctgactcggccattctatgtgcctcaaaacagagtgcaggcggggcacggtggctcacacctgtaatcccagcactttgtgaggccaaggtgggcagatcacttgaggtcaggagttcaagaccagcctggccaacatggtgaaacactgtctctactaaaaatacaaaaattagctgggtgtgttggcgggcgcctgtaattccagctactcgggaggctgaggcaggagaattgcctgaacccaagaggtggaggttgcagtgagccaagattgagtgaaactccatctgaaaaaaaaagaaagactaaaataatagggcttagtctaccctaacttattctcatcttttaggagatttttgcagaactttaacaattatcagtatccctgacctcaatttgatgctgaaaagtatgctaggtagtagtaattttgaaagctatttgcttttttgtttggttgtaactcaaattagtaaaaatgaacatgggtttgccccggggggcagaggtttcagtgagccgtgatcgtgccactgcactccagcctgggtgacagagagagactctgtctaaaaaaaaaaaaaaaaaaaaaaaaggtgggttt

SEQ ID NO: 282 - DNA, 4167 bp, Homo sapiens
  SITE (2901): n equals a,t,g, or c
  SITE (2902): n equals a,t,g, or c
  SITE (2903): n equals a,t,g, or c
  SITE (2904): n equals a,t,g, or c
  SITE (2905): n equals a,t,g, or c
  SITE (2906): n equals a,t,g, or c
  SITE (2907): n equals a,t,g, or c
  SITE (2908): n equals a,t,g, or c
  SITE (2909): n equals a,t,g, or c
  SITE (2910): n equals a,t,g, or c
  SITE (2911): n equals a,t,g, or c
  SITE (2912): n equals a,t,g, or c
  SITE (2913): n equals a,t,g, or c
  SITE (2914): n equals a,t,g, or c
  SITE (2915): n equals a,t,g, or c
  SITE (2916): n equals a,t,g, or c
  SITE (2917): n equals a,t,g, or c
  SITE (2918): n equals a,t,g, or c
  SITE (2919): n equals a,t,g, or c
  SITE (2920): n equals a,t,g, or c
  SITE (2921): n equals a,t,g, or c
  SITE (2922): n equals a,t,g, or c
  SITE (2923): n equals a,t,g, or c
  SITE (2924): n equals a,t,g, or c
  SITE (2925): n equals a,t,g, or c
  SITE (2926): n equals a,t,g, or c
  SITE (2927): n equals a,t,g, or c
  SITE (2928): n equals a,t,g, or c
  SITE (2929): n equals a,t,g, or c
  SITE (2930): n equals a,t,g, or c
  SITE (2931): n equals a,t,g, or c
  SITE (2932): n equals a,t,g, or c
  SITE (2933): n equals a,t,g, or c
  SITE (2934): n equals a,t,g, or c
  SITE (2935): n equals a,t,g, or c
  SITE (2936): n equals a,t,g, or c
  SITE (2937): n equals a,t,g, or c
  SITE (2938): n equals a,t,g, or c
  SITE (2939): n equals a,t,g, or c
  SITE (2940): n equals a,t,g, or c
  SITE (2941): n equals a,t,g, or c
  SITE (2942): n equals a,t,g, or c
  SITE (2943): n equals a,t,g, or c
  SITE (2944): n equals a,t,g, or c
  SITE (2945): n equals a,t,g, or c
  SITE (2946): n equals a,t,g, or c
  SITE (2947): n equals a,t,g, or c
  SITE (2948): n equals a,t,g, or c
  SITE (2949): n equals a,t,g, or c
  SITE (2950): n equals a,t,g, or c
  SITE (2951): n equals a,t,g, or c
  SITE (2952): n equals a,t,g, or c
  SITE (2953): n equals a,t,g, or c
  SITE (2954): n equals a,t,g, or c
  SITE (2955): n equals a,t,g, or c
  SITE (2956): n equals a,t,g, or c
  SITE (2957): n equals a,t,g, or c
  SITE (2958): n equals a,t,g, or c
  SITE (2959): n equals a,t,g, or c
  SITE (2960): n equals a,t,g, or c
  SITE (2961): n equals a,t,g, or c
  SITE (2962): n equals a,t,g, or c
  SITE (2963): n equals a,t,g, or c
  SITE (2964): n equals a,t,g, or c
  SITE (2965): n equals a,t,g, or c
  SITE (2966): n equals a,t,g, or c
  SITE (2967): n equals a,t,g, or c
  SITE (2968): n equals a,t,g, or c
  SITE (2969): n equals a,t,g, or c
  SITE (2970): n equals a,t,g, or c
  SITE (2971): n equals a,t,g, or c
  SITE (2972): n equals a,t,g, or c
  SITE (2973): n equals a,t,g, or c
  SITE (2974): n equals a,t,g, or c
  SITE (2975): n equals a,t,g, or c
  SITE (2976): n equals a,t,g, or c
  SITE (2977): n equals a,t,g, or c
  SITE (2978): n equals a,t,g, or c
  SITE (2979): n equals a,t,g, or c
  SITE (2980): n equals a,t,g, or c
  SITE (2981): n equals a,t,g, or c
  SITE (2982): n equals a,t,g, or c
  SITE (2983): n equals a,t,g, or c
  SITE (2984): n equals a,t,g, or c
  SITE (2985): n equals a,t,g, or c
  SITE (2986): n equals a,t,g, or c
  SITE (2987): n equals a,t,g, or c
  SITE (2988): n equals a,t,g, or c
  SITE (2989): n equals a,t,g, or c
  SITE (2990): n equals a,t,g, or c
  SITE (2991): n equals a,t,g, or c
  SITE (2992): n equals a,t,g, or c
  SITE (2993): n equals a,t,g, or c
  SITE (2994): n equals a,t,g, or c
  SITE (2995): n equals a,t,g, or c
  SITE (2996): n equals a,t,g, or c
  SITE (2997): n equals a,t,g, or c
  SITE (2998): n equals a,t,g, or c
  SITE (2999): n equals a,t,g, or c
  SITE (3000): n equals a,t,g, or c
  SITE (3001): n equals a,t,g, or c
  SITE (3002): n equals a,t,g, or c
  SITE (3003): n equals a,t,g, or c
  SITE (3004): n equals a,t,g, or c
  SITE (3005): n equals a,t,g, or c
  SITE (3006): n equals a,t,g, or c
  SITE (3007): n equals a,t,g, or c
  SITE (3008): n equals a,t,g, or c
  SITE (3009): n equals a,t,g, or c
  SITE (3010): n equals a,t,g, or c
  SITE (3011): n equals a,t,g, or c
  SITE (3012): n equals a,t,g, or c
  SITE (3013): n equals a,t,g, or c
  SITE (3014): n equals a,t,g, or c
  SITE (3015): n equals a,t,g, or c
  SITE (3016): n equals a,t,g, or c
  SITE (3017): n equals a,t,g, or c
  SITE (3018): n equals a,t,g, or c
  SITE (3019): n equals a,t,g, or c
  SITE (3020): n equals a,t,g, or c
  SITE (3021): n equals a,t,g, or c
  SITE (3022): n equals a,t,g, or c
  SITE (3023): n equals a,t,g, or c
  SITE (3024): n equals a,t,g, or c
  SITE (3025): n equals a,t,g, or c
  SITE (3026): n equals a,t,g, or c
  SITE (3027): n equals a,t,g, or c
  SITE (3028): n equals a,t,g, or c
  SITE (3029): n equals a,t,g, or c
  SITE (3030): n equals a,t,g, or c
  SITE (3031): n equals a,t,g, or c
  SITE (3032): n equals a,t,g, or c
  SITE (3033): n equals a,t,g, or c
  SITE (3034): n equals a,t,g, or c
  SITE (3035): n equals a,t,g, or c
  SITE (3036): n equals a,t,g, or c
  SITE (3037): n equals a,t,g, or c
  SITE (3038): n equals a,t,g, or c
  SITE (3039): n equals a,t,g, or c
  SITE (3040): n equals a,t,g, or c
  SITE (3041): n equals a,t,g, or c
  SITE (3042): n equals a,t,g, or c
  SITE (3043): n equals a,t,g, or c
  SITE (3044): n equals a,t,g, or c
  SITE (3045): n equals a,t,g, or c
  SITE (3046): n equals a,t,g, or c
  SITE (3047): n equals a,t,g, or c
  SITE (3048): n equals a,t,g, or c
  SITE (3049): n equals a,t,g, or c
  SITE (3050): n equals a,t,g, or c
  SITE (3051): n equals a,t,g, or c
  SITE (3052): n equals a,t,g, or c
  SITE (3053): n equals a,t,g, or c
  SITE (3054): n equals a,t,g, or c
  SITE (3055): n equals a,t,g, or c
  SITE (3056): n equals a,t,g, or c
  SITE (3057): n equals a,t,g, or c
  SITE (3058): n equals a,t,g, or c
  SITE (3059): n equals a,t,g, or c
  SITE (3060): n equals a,t,g, or c
  SITE (3061): n equals a,t,g, or c
  SITE (3062): n equals a,t,g, or c
  SITE (3063): n equals a,t,g, or c
  SITE (3064): n equals a,t,g, or c
  SITE (3065): n equals a,t,g, or c
  SITE (3066): n equals a,t,g, or c
  SITE (3067): n equals a,t,g, or c
  SITE (3068): n equals a,t,g, or c
  SITE (3069): n equals a,t,g, or c
  SITE (3070): n equals a,t,g, or c
  SITE (3071): n equals a,t,g, or c
  SITE (3072): n equals a,t,g, or c
  SITE (3073): n equals a,t,g, or c
  SITE (3074): n equals a,t,g, or c
  SITE (3075): n equals a,t,g, or c
  SITE (3076): n equals a,t,g, or c
  SITE (3077): n equals a,t,g, or c
  SITE (3078): n equals a,t,g, or c
  SITE (3079): n equals a,t,g, or c
  SITE (3080): n equals a,t,g, or c
  SITE (3081): n equals a,t,g, or c
  SITE (3082): n equals a,t,g, or c
  SITE (3083): n equals a,t,g, or c
  SITE (3084): n equals a,t,g, or c
  SITE (3085): n equals a,t,g, or c
  SITE (3086): n equals a,t,g, or c
  SITE (3087): n equals a,t,g, or c
  SITE (3088): n equals a,t,g, or c
  SITE (3089): n equals a,t,g, or c
  SITE (3090): n equals a,t,g, or c
  SITE (3091): n equals a,t,g, or c
  SITE (3092): n equals a,t,g, or c
  SITE (3093): n equals a,t,g, or c
  SITE (3094): n equals a,t,g, or c
  SITE (3095): n equals a,t,g, or c
  SITE (3096): n equals a,t,g, or c
  SITE (3097): n equals a,t,g, or c
  SITE (3098): n equals a,t,g, or c
  SITE (3099): n equals a,t,g, or c
  SITE (3100): n equals a,t,g, or c
  SITE (3101): n equals a,t,g, or c
  SITE (3102): n equals a,t,g, or c
  SITE (3103): n equals a,t,g, or c
  SITE (3104): n equals a,t,g, or c
  SITE (3105): n equals a,t,g, or c
  SITE (3106): n equals a,t,g, or c
  SITE (3107): n equals a,t,g, or c
  SITE (3108): n equals a,t,g, or c
  SITE (3109): n equals a,t,g, or c
  SITE (3110): n equals a,t,g, or c
  SITE (3111): n equals a,t,g, or c
  SITE (3112): n equals a,t,g, or c
  SITE (3113): n equals a,t,g, or c
  SITE (3114): n equals a,t,g, or c
  SITE (3115): n equals a,t,g, or c
  SITE (3116): n equals a,t,g, or c
  SITE (3117): n equals a,t,g, or c
  SITE (3118): n equals a,t,g, or c
  SITE (3119): n equals a,t,g, or c
  SITE (3120): n equals a,t,g, or c
  SITE (3121): n equals a,t,g, or c
  SITE (3122): n equals a,t,g, or c
  SITE (3123): n equals a,t,g, or c
  SITE (3124): n equals a,t,g, or c
  SITE (3125): n equals a,t,g, or c
  SITE (3126): n equals a,t,g, or c
  SITE (3127): n equals a,t,g, or c
  SITE (3128): n equals a,t,g, or c
  SITE (3129): n equals a,t,g, or c
  SITE (3130): n equals a,t,g, or c
  SITE (3131): n equals a,t,g, or c
  SITE (3132): n equals a,t,g, or c
  SITE (3133): n equals a,t,g, or c
  SITE (3134): n equals a,t,g, or c
  SITE (3135): n equals a,t,g, or c
  SITE (3136): n equals a,t,g, or c
  SITE (3137): n equals a,t,g, or c
  SITE (3138): n equals a,t,g, or c
  SITE (3139): n equals a,t,g, or c
  SITE (3140): n equals a,t,g, or c
  SITE (3141): n equals a,t,g, or c
  SITE (3142): n equals a,t,g, or c
  SITE (3143): n equals a,t,g, or c
  SITE (3144): n equals a,t,g, or c
  SITE (3145): n equals a,t,g, or c
  SITE (3146): n equals a,t,g, or c
  SITE (3147): n equals a,t,g, or c
  SITE (3148): n equals a,t,g, or c
  SITE (3149): n equals a,t,g, or c
  SITE (3150): n equals a,t,g, or c
  SITE (3151): n equals a,t,g, or c
  SITE (3152): n equals a,t,g, or c
  SITE (3153): n equals a,t,g, or c
  SITE (3154): n equals a,t,g, or c
  SITE (3155): n equals a,t,g, or c
  SITE (3156): n equals a,t,g, or c
  SITE (3157): n equals a,t,g, or c
  SITE (3158): n equals a,t,g, or c
  SITE (3159): n equals a,t,g, or c
  SITE (3160): n equals a,t,g, or c
  SITE (3161): n equals a,t,g, or c
  SITE (3162): n equals a,t,g, or c
  SITE (3163): n equals a,t,g, or c
  SITE (3164): n equals a,t,g, or c
  SITE (3165): n equals a,t,g, or c
  SITE (3166): n equals a,t,g, or c
  SITE (3167): n equals a,t,g, or c
  SITE (3168): n equals a,t,g, or c
  SITE (3169): n equals a,t,g, or c
  SITE (3170): n equals a,t,g, or c
  SITE (3171): n equals a,t,g, or c
  SITE (3172): n equals a,t,g, or c
  SITE (3173): n equals a,t,g, or c
  SITE (3174): n equals a,t,g, or c
  SITE (3175): n equals a,t,g, or c
  SITE (3176): n equals a,t,g, or c
  SITE (3177): n equals a,t,g, or c
  SITE (3178): n equals a,t,g, or c
  SITE (3179): n equals a,t,g, or c
  SITE (3180): n equals a,t,g, or c
  SITE (3181): n equals a,t,g, or c
  SITE (3182): n equals a,t,g, or c
  SITE (3183): n equals a,t,g, or c
  SITE (3184): n equals a,t,g, or c
  SITE (3185): n equals a,t,g, or c
  SITE (3186): n equals a,t,g, or c
  SITE (3187): n equals a,t,g, or c
  SITE (3188): n equals a,t,g, or c
  SITE (3189): n equals a,t,g, or c
  SITE (3190): n equals a,t,g, or c
  SITE (3191): n equals a,t,g, or c
  SITE (3192): n equals a,t,g, or c
  SITE (3193): n equals a,t,g, or c
  SITE (3194): n equals a,t,g, or c
  SITE (3195): n equals a,t,g, or c
  SITE (3196): n equals a,t,g, or c
  SITE (3197): n equals a,t,g, or c
  SITE (3198): n equals a,t,g, or c
  SITE (3199): n equals a,t,g, or c
  SITE (3200): n equals a,t,g, or c
  SITE (3201): n equals a,t,g, or c
  SITE (3202): n equals a,t,g, or c
  SITE (3203): n equals a,t,g, or c
  SITE (3204): n equals a,t,g, or c
  SITE (3205): n equals a,t,g, or c
  SITE (3206): n equals a,t,g, or c
  SITE (3207): n equals a,t,g, or c
  SITE (3208): n equals a,t,g, or c
  SITE (3209): n equals a,t,g, or c
  SITE (3210): n equals a,t,g, or c
  SITE (3211): n equals a,t,g, or c
  SITE (3212): n equals a,t,g, or c
  SITE (3213): n equals a,t,g, or c
  SITE (3214): n equals a,t,g, or c
  SITE (3215): n equals a,t,g, or c
  SITE (3216): n equals a,t,g, or c
  SITE (3217): n equals a,t,g, or c
  SITE (3218): n equals a,t,g, or c
  SITE (3219): n equals a,t,g, or c
  SITE (3220): n equals a,t,g, or c
  SITE (3221): n equals a,t,g, or c
  SITE (3222): n equals a,t,g, or c
  SITE (3223): n equals a,t,g, or c
  SITE (3224): n equals a,t,g, or c
  SITE (3225): n equals a,t,g, or c
  SITE (3226): n equals a,t,g, or c
  SITE (3227): n equals a,t,g, or c
  SITE (3228): n equals a,t,g, or c
  SITE (3229): n equals a,t,g, or c
  SITE (3230): n equals a,t,g, or c
  SITE (3231): n equals a,t,g, or c
  SITE (3232): n equals a,t,g, or c
  SITE (3233): n equals a,t,g, or c
  SITE (3234): n equals a,t,g, or c
  SITE (3235): n equals a,t,g, or c
  SITE (3236): n equals a,t,g, or c
  SITE (3237): n equals a,t,g, or c
  SITE (3238): n equals a,t,g, or c
  SITE (3239): n equals a,t,g, or c
  SITE (3240): n equals a,t,g, or c
  SITE (3241): n equals a,t,g, or c
  SITE (3242): n equals a,t,g, or c
  SITE (3243): n equals a,t,g, or c
  SITE (3244): n equals a,t,g, or c
  SITE (3245): n equals a,t,g, or c
  SITE (3246): n equals a,t,g, or c
  SITE (3247): n equals a,t,g, or c
  SITE (3248): n equals a,t,g, or c
  SITE (3249): n equals a,t,g, or c
  SITE (3250): n equals a,t,g, or c
  SITE (3251): n equals a,t,g, or c
  SITE (3252): n equals a,t,g, or c
  SITE (3253): n equals a,t,g, or c
  SITE (3254): n equals a,t,g, or c
  SITE (3255): n equals a,t,g, or c
  SITE (3256): n equals a,t,g, or c
  SITE (3257): n equals a,t,g, or c
  SITE (3258): n equals a,t,g, or c
  SITE (3259): n equals a,t,g, or c
  SITE (3260): n equals a,t,g, or c
  SITE (3261): n equals a,t,g, or c
  SITE (3262): n equals a,t,g, or c
  SITE (3263): n equals a,t,g, or c
  SITE (3264): n equals a,t,g, or c
  SITE (3265): n equals a,t,g, or c
  SITE (3266): n equals a,t,g, or c
  SITE (3267): n equals a,t,g, or c
  SITE (3268): n equals a,t,g, or c
  SITE (3269): n equals a,t,g, or c
  SITE (3270): n equals a,t,g, or c
  SITE (3271): n equals a,t,g, or c
  SITE (3272): n equals a,t,g, or c
  SITE (3273): n equals a,t,g, or c
  SITE (3274): n equals a,t,g, or c
  SITE (3275): n equals a,t,g, or c
  SITE (3276): n equals a,t,g, or c
  SITE (3277): n equals a,t,g, or c
  SITE (3278): n equals a,t,g, or c
  SITE (3279): n equals a,t,g, or c
  SITE (3280): n equals a,t,g, or c
  SITE (3281): n equals a,t,g, or c
  SITE (3282): n equals a,t,g, or c
  SITE (3283): n equals a,t,g, or c
  SITE (3284): n equals a,t,g, or c
  SITE (3285): n equals a,t,g, or c
  SITE (3286): n equals a,t,g, or c
  SITE (3287): n equals a,t,g, or c
  SITE (3288): n equals a,t,g, or c
  SITE (3289): n equals a,t,g, or c
  SITE (3290): n equals a,t,g, or c
  SITE (3291): n equals a,t,g, or c
  SITE (3292): n equals a,t,g, or c
  SITE (3293): n equals a,t,g, or c
  SITE (3294): n equals a,t,g, or c
  SITE (3295): n equals a,t,g, or c
  SITE (3296): n equals a,t,g, or c
  SITE (3297): n equals a,t,g, or c
  SITE (3298): n equals a,t,g, or c
  SITE (3299): n equals a,t,g, or c
  SITE (3300): n equals a,t,g, or c
  SITE (3301): n equals a,t,g, or c
  SITE (3302): n equals a,t,g, or c
  SITE (3303): n equals a,t,g, or c
  SITE (3304): n equals a,t,g, or c
  SITE (3305): n equals a,t,g, or c
  SITE (3306): n equals a,t,g, or c
  SITE (3307): n equals a,t,g, or c
  SITE (3308): n equals a,t,g, or c
  SITE (3309): n equals a,t,g, or c
  SITE (3310): n equals a,t,g, or c
  SITE (3311): n equals a,t,g, or c
  SITE (3312): n equals a,t,g, or c
  SITE (3313): n equals a,t,g, or c
  SITE (3314): n equals a,t,g, or c
  SITE (3315): n equals a,t,g, or c
  SITE (3316): n equals a,t,g, or c
  SITE (3317): n equals a,t,g, or c
  SITE (3318): n equals a,t,g, or c
  SITE (3319): n equals a,t,g, or c
  SITE (3320): n equals a,t,g, or c
  SITE (3321): n equals a,t,g, or c
  SITE (3322): n equals a,t,g, or c
  SITE (3323): n equals a,t,g, or c
  SITE (3324): n equals a,t,g, or c
  SITE (3325): n equals a,t,g, or c
  SITE (3326): n equals a,t,g, or c
  SITE (3327): n equals a,t,g, or c
  SITE (3328): n equals a,t,g, or c
  SITE (3329): n equals a,t,g, or c
  SITE (3330): n equals a,t,g, or c
  SITE (3331): n equals a,t,g, or c
  SITE (3332): n equals a,t,g, or c
  SITE (3333): n equals a,t,g, or c
  SITE (3334): n equals a,t,g, or c
  SITE (3335): n equals a,t,g, or c
  SITE (3336): n equals a,t,g, or c
  SITE (3337): n equals a,t,g, or c
  SITE (3338): n equals a,t,g, or c
  SITE (3339): n equals a,t,g, or c
  SITE (3340): n equals a,t,g, or c
  SITE (3341): n equals a,t,g, or c
  SITE (3342): n equals a,t,g, or c
  SITE (3343): n equals a,t,g, or c
  SITE (3344): n equals a,t,g, or c
  SITE (3345): n equals a,t,g, or c
  SITE (3346): n equals a,t,g, or c
  SITE (3347): n equals a,t,g, or c
  SITE (3348): n equals a,t,g, or c
  SITE (3349): n equals a,t,g, or c
  SITE (3350): n equals a,t,g, or c
  SITE (3351): n equals a,t,g, or c
  SITE (3352): n equals a,t,g, or c
  SITE (3353): n equals a,t,g, or c
  SITE (3354): n equals a,t,g, or c
  SITE (3355): n equals a,t,g, or c
  SITE (3356): n equals a,t,g, or c
  SITE (3357): n equals a,t,g, or c
  SITE (3358): n equals a,t,g, or c
  SITE (3359): n equals a,t,g, or c
  SITE (3360): n equals a,t,g, or c
  SITE (3361): n equals a,t,g, or c
  SITE (3362): n equals a,t,g, or c
  SITE (3363): n equals a,t,g, or c
  SITE (3364): n equals a,t,g, or c
  SITE (3365): n equals a,t,g, or c
  SITE (3366): n equals a,t,g, or c
  SITE (3367): n equals a,t,g, or c
  SITE (3368): n equals a,t,g, or c
  SITE (3369): n equals a,t,g, or c
  SITE (3370): n equals a,t,g, or c
  SITE (3371): n equals a,t,g, or c
  SITE (3372): n equals a,t,g, or c
  SITE (3373): n equals a,t,g, or c
  SITE (3374): n equals a,t,g, or c
  SITE (3375): n equals a,t,g, or c
  SITE (3376): n equals a,t,g, or c
  SITE (3377): n equals a,t,g, or c
  SITE (3378): n equals a,t,g, or c
  SITE (3379): n equals a,t,g, or c
  SITE (3380): n equals a,t,g, or c
  SITE (3381): n equals a,t,g, or c
  SITE (3382): n equals a,t,g, or c
  SITE (3383): n equals a,t,g, or c
  SITE (3384): n equals a,t,g, or c
  SITE (3385): n equals a,t,g, or c
  SITE (3386): n equals a,t,g, or c
  SITE (3387): n equals a,t,g, or c
  SITE (3388): n equals a,t,g, or c
  SITE (3389): n equals a,t,g, or c
  SITE (3390): n equals a,t,g, or c
  SITE (3391): n equals a,t,g, or c
  SITE (3392): n equals a,t,g, or c
  SITE (3393): n equals a,t,g, or c
  SITE (3394): n equals a,t,g, or c
  SITE (3395): n equals a,t,g, or c
  SITE (3396): n equals a,t,g, or c
  SITE (3397): n equals a,t,g, or c
  SITE (3398): n equals a,t,g, or c
  SITE (3399): n equals a,t,g, or c
  SITE (3400): n equals a,t,g, or c
  SITE (3401): n equals a,t,g, or c
  SITE (3402): n equals a,t,g, or c
  SITE (3403): n equals a,t,g, or c
  SITE (3404): n equals a,t,g, or c
  SITE (3405): n equals a,t,g, or c
  SITE (3406): n equals a,t,g, or c
  SITE (3407): n equals a,t,g, or c
  SITE (3408): n equals a,t,g, or c
  SITE (3409): n equals a,t,g, or c
  SITE (3410): n equals a,t,g, or c
  SITE (3411): n equals a,t,g, or c
  SITE (3412): n equals a,t,g, or c
  SITE (3413): n equals a,t,g, or c
  SITE (3414): n equals a,t,g, or c
  SITE (3415): n equals a,t,g, or c
  SITE (3416): n equals a,t,g, or c
  SITE (3417): n equals a,t,g, or c
  SITE (3418): n equals a,t,g, or c
  SITE (3419): n equals a,t,g, or c
  SITE (3420): n equals a,t,g, or c
  SITE (3421): n equals a,t,g, or c
  SITE (3422): n equals a,t,g, or c
  SITE (3423): n equals a,t,g, or c
  SITE (3424): n equals a,t,g, or c
  SITE (3425): n equals a,t,g, or c
  SITE (3426): n equals a,t,g, or c
  SITE (3427): n equals a,t,g, or c
  SITE (3428): n equals a,t,g, or c
  SITE (3429): n equals a,t,g, or c
  SITE (3430): n equals a,t,g, or c
  SITE (3431): n equals a,t,g, or c
  SITE (3432): n equals a,t,g, or c
  SITE (3433): n equals a,t,g, or c
  SITE (3434): n equals a,t,g, or c
  SITE (3435): n equals a,t,g, or c
  SITE (3436): n equals a,t,g, or c
  SITE (3437): n equals a,t,g, or c
  SITE (3438): n equals a,t,g, or c
  SITE (3439): n equals a,t,g, or c
  SITE (3440): n equals a,t,g, or c
  SITE (3441): n equals a,t,g, or c
  SITE (3442): n equals a,t,g, or c
  SITE (3443): n equals a,t,g, or c
  SITE (3444): n equals a,t,g, or c
  SITE (3445): n equals a,t,g, or c
  SITE (3446): n equals a,t,g, or c
  SITE (3447): n equals a,t,g, or c
  SITE (3448): n equals a,t,g, or c
  SITE (3449): n equals a,t,g, or c
  SITE (3450): n equals a,t,g, or c
  SITE (3451): n equals a,t,g, or c
  SITE (3452): n equals a,t,g, or c
  SITE (3453): n equals a,t,g, or c
  SITE (3454): n equals a,t,g, or c
  SITE (3455): n equals a,t,g, or c
  SITE (3456): n equals a,t,g, or c
  SITE (3457): n equals a,t,g, or c
  SITE (3458): n equals a,t,g, or c
  SITE (3459): n equals a,t,g, or c
  SITE (3460): n equals a,t,g, or c
  SITE (3461): n equals a,t,g, or c
  SITE (3462): n equals a,t,g, or c
  SITE (3463): n equals a,t,g, or c
  SITE (3464): n equals a,t,g, or c
  SITE (3465): n equals a,t,g, or c
  SITE (3466): n equals a,t,g, or c
  SITE (3467): n equals a,t,g, or c
  SITE (3468): n equals a,t,g, or c
  SITE (3469): n equals a,t,g, or c
  SITE (3470): n equals a,t,g, or c
  SITE (3471): n equals a,t,g, or c
  SITE (3472): n equals a,t,g, or c
  SITE (3473): n equals a,t,g, or c
  SITE (3474): n equals a,t,g, or c
  SITE (3475): n equals a,t,g, or c
  SITE (3476): n equals a,t,g, or c
  SITE (3477): n equals a,t,g, or c
  SITE (3478): n equals a,t,g, or c
  SITE (3479): n equals a,t,g, or c
  SITE (3480): n equals a,t,g, or c
  SITE (3481): n equals a,t,g, or c
  SITE (3482): n equals a,t,g, or c
  SITE (3483): n equals a,t,g, or c
  SITE (3484): n equals a,t,g, or c
  SITE (3485): n equals a,t,g, or c
  SITE (3486): n equals a,t,g, or c
  SITE (3487): n equals a,t,g, or c
  SITE (3488): n equals a,t,g, or c
  SITE (3489): n equals a,t,g, or c
  SITE (3490): n equals a,t,g, or c
  SITE (3491): n equals a,t,g, or c
  SITE (3492): n equals a,t,g, or c
  SITE (3493): n equals a,t,g, or c
  SITE (3494): n equals a,t,g, or c
  SITE (3495): n equals a,t,g, or c
  SITE (3496): n equals a,t,g, or c
  SITE (3497): n equals a,t,g, or c
  SITE (3498): n equals a,t,g, or c
  SITE (3499): n equals a,t,g, or c
  SITE (3500): n equals a,t,g, or c
  SITE (3501): n equals a,t,g, or c
  SITE (3502): n equals a,t,g, or c
  SITE (3503): n equals a,t,g, or c
  SITE (3504): n equals a,t,g, or c
  SITE (3505): n equals a,t,g, or c
  SITE (3506): n equals a,t,g, or c
  SITE (3507): n equals a,t,g, or c
  SITE (3508): n equals a,t,g, or c
  SITE (3509): n equals a,t,g, or c
  SITE (3510): n equals a,t,g, or c
  SITE (3511): n equals a,t,g, or c
  SITE (3512): n equals a,t,g, or c
  SITE (3513): n equals a,t,g, or c
  SITE (3514): n equals a,t,g, or c
  SITE (3515): n equals a,t,g, or c
  SITE (3516): n equals a,t,g, or c
  SITE (3517): n equals a,t,g, or c
  SITE (3518): n equals a,t,g, or c
  SITE (3519): n equals a,t,g, or c
  SITE (3520): n equals a,t,g, or c
  SITE (3521): n equals a,t,g, or c
  SITE (3522): n equals a,t,g, or c
  SITE (3523): n equals a,t,g, or c
  SITE (3524): n equals a,t,g, or c
  SITE (3525): n equals a,t,g, or c
  SITE (3526): n equals a,t,g, or c
  SITE (3527): n equals a,t,g, or c
  SITE (3528): n equals a,t,g, or c
  SITE (3529): n equals a,t,g, or c
  SITE (3530): n equals a,t,g, or c
  SITE (3531): n equals a,t,g, or c
  SITE (3532): n equals a,t,g, or c
  SITE (3533): n equals a,t,g, or c
  SITE (3534): n equals a,t,g, or c
  SITE (3535): n equals a,t,g, or c
  SITE (3536): n equals a,t,g, or c
  SITE (3537): n equals a,t,g, or c
  SITE (3538): n equals a,t,g, or c
  SITE (3539): n equals a,t,g, or c
  SITE (3540): n equals a,t,g, or c
  SITE (3541): n equals a,t,g, or c
  SITE (3542): n equals a,t,g, or c
  SITE (3543): n equals a,t,g, or c
  SITE (3544): n equals a,t,g, or c
  SITE (3545): n equals a,t,g, or c
  SITE (3546): n equals a,t,g, or c
  SITE (3547): n equals a,t,g, or c
  SITE (3548): n equals a,t,g, or c
  SITE (3549): n equals a,t,g, or c
  SITE (3550): n equals a,t,g, or c
  SITE (3551): n equals a,t,g, or c
  SITE (3552): n equals a,t,g, or c
  SITE (3553): n equals a,t,g, or c
  SITE (3554): n equals a,t,g, or c
  SITE (3555): n equals a,t,g, or c
  SITE (3556): n equals a,t,g, or c
  SITE (3557): n equals a,t,g, or c
  SITE (3558): n equals a,t,g, or c
  SITE (3559): n equals a,t,g, or c
  SITE (3560): n equals a,t,g, or c
  SITE (3561): n equals a,t,g, or c
  SITE (3562): n equals a,t,g, or c
  SITE (3563): n equals a,t,g, or c
  SITE (3564): n equals a,t,g, or c
  SITE (3565): n equals a,t,g, or c
  SITE (3566): n equals a,t,g, or c
  SITE (3567): n equals a,t,g, or c
  SITE (3568): n equals a,t,g, or c
  SITE (3569): n equals a,t,g, or c
  SITE (3570): n equals a,t,g, or c
  SITE (3571): n equals a,t,g, or c
  SITE (3572): n equals a,t,g, or c
  SITE (3573): n equals a,t,g, or c
  SITE (3574): n equals a,t,g, or c
  SITE (3575): n equals a,t,g, or c
  SITE (3576): n equals a,t,g, or c
  SITE (3577): n equals a,t,g, or c
  SITE (3578): n equals a,t,g, or c
  SITE (3579): n equals a,t,g, or c
  SITE (3580): n equals a,t,g, or c
  SITE (3581): n equals a,t,g, or c
  SITE (3582): n equals a,t,g, or c
  SITE (3583): n equals a,t,g, or c
  SITE (3584): n equals a,t,g, or c
  SITE (3585): n equals a,t,g, or c
  SITE (3586): n equals a,t,g, or c
  SITE (3587): n equals a,t,g, or c
  SITE (3588): n equals a,t,g, or c
  SITE (3589): n equals a,t,g, or c
  SITE (3590): n equals a,t,g, or c
  SITE (3591): n equals a,t,g, or c
  SITE (3592): n equals a,t,g, or c
  SITE (3593): n equals a,t,g, or c
  SITE (3594): n equals a,t,g, or c
  SITE (3595): n equals a,t,g, or c
  SITE (3596): n equals a,t,g, or c
  SITE (3597): n equals a,t,g, or c
  SITE (3598): n equals a,t,g, or c
  SITE (3599): n equals a,t,g, or c
  SITE (3600): n equals a,t,g, or c
  SITE (3601): n equals a,t,g, or c
  SITE (3602): n equals a,t,g, or c
  SITE (3603): n equals a,t,g, or c
  SITE (3604): n equals a,t,g, or c
  SITE (3605): n equals a,t,g, or c
  SITE (3606): n equals a,t,g, or c
  SITE (3607): n equals a,t,g, or c
  SITE (3608): n equals a,t,g, or c
  SITE (3609): n equals a,t,g, or c
  SITE (3610): n equals a,t,g, or c
  SITE (3611): n equals a,t,g, or c
  SITE (3612): n equals a,t,g, or c
  SITE (3613): n equals a,t,g, or c
  SITE (3614): n equals a,t,g, or c
  SITE (3615): n equals a,t,g, or c
  SITE (3616): n equals a,t,g, or c
  SITE (3617): n equals a,t,g, or c
  SITE (3618): n equals a,t,g, or c
  SITE (3619): n equals a,t,g, or c
  SITE (3620): n equals a,t,g, or c
  SITE (3621): n equals a,t,g, or c
  SITE (3622): n equals a,t,g, or c
  SITE (3623): n equals a,t,g, or c
  SITE (3624): n equals a,t,g, or c
  SITE (3625): n equals a,t,g, or c
  SITE (3626): n equals a,t,g, or c
  SITE (3627): n equals a,t,g, or c
  SITE (3628): n equals a,t,g, or c
  SITE (3629): n equals a,t,g, or c
  SITE (3630): n equals a,t,g, or c
  SITE (3631): n equals a,t,g, or c
  SITE (3632): n equals a,t,g, or c
  SITE (3633): n equals a,t,g, or c
  SITE (3634): n equals a,t,g, or c
  SITE (3635): n equals a,t,g, or c
  SITE (3636): n equals a,t,g, or c
  SITE (3637): n equals a,t,g, or c
  SITE (3638): n equals a,t,g, or c
  SITE (3639): n equals a,t,g, or c
  SITE (3640): n equals a,t,g, or c
  SITE (3641): n equals a,t,g, or c
  SITE (3642): n equals a,t,g, or c
  SITE (3643): n equals a,t,g, or c
  SITE (3644): n equals a,t,g, or c
  SITE (3645): n equals a,t,g, or c
  SITE (3646): n equals a,t,g, or c
  SITE (3647): n equals a,t,g, or c
  SITE (3648): n equals a,t,g, or c
  SITE (3649): n equals a,t,g, or c
  SITE (3650): n equals a,t,g, or c
  SITE (3651): n equals a,t,g, or c
  SITE (3652): n equals a,t,g, or c
  SITE (3653): n equals a,t,g, or c
  SITE (3654): n equals a,t,g, or c
  SITE (3655): n equals a,t,g, or c
  SITE (3656): n equals a,t,g, or c
  SITE (3657): n equals a,t,g, or c
  SITE (3658): n equals a,t,g, or c
  SITE (3659): n equals a,t,g, or c
  SITE (3660): n equals a,t,g, or c
  SITE (3661): n equals a,t,g, or c
  SITE (3662): n equals a,t,g, or c
  SITE (3663): n equals a,t,g, or c
  SITE (3664): n equals a,t,g, or c
  SITE (3665): n equals a,t,g, or c
  SITE (3666): n equals a,t,g, or c
  SITE (3667): n equals a,t,g, or c
  SITE (3668): n equals a,t,g, or c
  SITE (3669): n equals a,t,g, or c
  SITE (3670): n equals a,t,g, or c
  SITE (3671): n equals a,t,g, or c
  SITE (3672): n equals a,t,g, or c
  SITE (3673): n equals a,t,g, or c
  SITE (3674): n equals a,t,g, or c
  SITE (3675): n equals a,t,g, or c
  SITE (3676): n equals a,t,g, or c
  SITE (3677): n equals a,t,g, or c
  SITE (3678): n equals a,t,g, or c
  SITE (3679): n equals a,t,g, or c
  SITE (3680): n equals a,t,g, or c
  SITE (3681): n equals a,t,g, or c
  SITE (3682): n equals a,t,g, or c
  SITE (3683): n equals a,t,g, or c
  SITE (3684): n equals a,t,g, or c
  SITE (3685): n equals a,t,g, or c
  SITE (3686): n equals a,t,g, or c
  SITE (3687): n equals a,t,g, or c
  SITE (3688): n equals a,t,g, or c
  SITE (3689): n equals a,t,g, or c
  SITE (3690): n equals a,t,g, or c
  SITE (3691): n equals a,t,g, or c
  SITE (3692): n equals a,t,g, or c
  SITE (3693): n equals a,t,g, or c
  SITE (3694): n equals a,t,g, or c
  SITE (3695): n equals a,t,g, or c
  SITE (3696): n equals a,t,g, or c
  SITE (3697): n equals a,t,g, or c
  SITE (3698): n equals a,t,g, or c
  SITE (3699): n equals a,t,g, or c
  SITE (3700): n equals a,t,g, or c
  SITE (3701): n equals a,t,g, or c
  SITE (3702): n equals a,t,g, or c
  SITE (3703): n equals a,t,g, or c
  SITE (3704): n equals a,t,g, or c
  SITE (3705): n equals a,t,g, or c
  SITE (3706): n equals a,t,g, or c
  SITE (3707): n equals a,t,g, or c
  SITE (3708): n equals a,t,g, or c
  SITE (3709): n equals a,t,g, or c
  SITE (3710): n equals a,t,g, or c
  SITE (3711): n equals a,t,g, or c
  SITE (3712): n equals a,t,g, or c
  SITE (3713): n equals a,t,g, or c
  SITE (3714): n equals a,t,g, or c
  SITE (3715): n equals a,t,g, or c
  SITE (3716): n equals a,t,g, or c
  SITE (3717): n equals a,t,g, or c
  SITE (3718): n equals a,t,g, or c
  SITE (3719): n equals a,t,g, or c
  SITE (3720): n equals a,t,g, or c
  SITE (3721): n equals a,t,g, or c
  SITE (3722): n equals a,t,g, or c
  SITE (3723): n equals a,t,g, or c
  SITE (3724): n equals a,t,g, or c
  SITE (3725): n equals a,t,g, or c
  SITE (3726): n equals a,t,g, or c
  SITE (3727): n equals a,t,g, or c
  SITE (3728): n equals a,t,g, or c
  SITE (3729): n equals a,t,g, or c
  SITE (3730): n equals a,t,g, or c
  SITE (3731): n equals a,t,g, or c
  SITE (3732): n equals a,t,g, or c
  SITE (3733): n equals a,t,g, or c
  SITE (3734): n equals a,t,g, or c
  SITE (3735): n equals a,t,g, or c
  SITE (3736): n equals a,t,g, or c
  SITE (3737): n equals a,t,g, or c
  SITE (3738): n equals a,t,g, or c
  SITE (3739): n equals a,t,g, or c
  SITE (3740): n equals a,t,g, or c
  SITE (3741): n equals a,t,g, or c
  SITE (3742): n equals a,t,g, or c
  SITE (3743): n equals a,t,g, or c
  SITE (3744): n equals a,t,g, or c
  SITE (3745): n equals a,t,g, or c
  SITE (3746): n equals a,t,g, or c
  SITE (3747): n equals a,t,g, or c
  SITE (3748): n equals a,t,g, or c
  SITE (3749): n equals a,t,g, or c
  SITE (3750): n equals a,t,g, or c
  SITE (3751): n equals a,t,g, or c
  SITE (3752): n equals a,t,g, or c
  SITE (3753): n equals a,t,g, or c
  SITE (3754): n equals a,t,g, or c
  SITE (3755): n equals a,t,g, or c
  SITE (3756): n equals a,t,g, or c
  SITE (3757): n equals a,t,g, or c
  SITE (3758): n equals a,t,g, or c
  SITE (3759): n equals a,t,g, or c
  SITE (3760): n equals a,t,g, or c
  SITE (3761): n equals a,t,g, or c
  SITE (3762): n equals a,t,g, or c
  SITE (3763): n equals a,t,g, or c
  SITE (3764): n equals a,t,g, or c
  SITE (3765): n equals a,t,g, or c
  SITE (3766): n equals a,t,g, or c
  SITE (3767): n equals a,t,g, or c
  SITE (3768): n equals a,t,g, or c
  SITE (3769): n equals a,t,g, or c
  SITE (3770): n equals a,t,g, or c
  SITE (3771): n equals a,t,g, or c
  SITE (3772): n equals a,t,g, or c
  SITE (3773): n equals a,t,g, or c
  SITE (3774): n equals a,t,g, or c
  SITE (3775): n equals a,t,g, or c
  SITE (3776): n equals a,t,g, or c
  SITE (3777): n equals a,t,g, or c
  SITE (3778): n equals a,t,g, or c
  SITE (3779): n equals a,t,g, or c
  SITE (3780): n equals a,t,g, or c
  SITE (3781): n equals a,t,g, or c
  SITE (3782): n equals a,t,g, or c
  SITE (3783): n equals a,t,g, or c
  SITE (3784): n equals a,t,g, or c
  SITE (3785): n equals a,t,g, or c
  SITE (3786): n equals a,t,g, or c
  SITE (3787): n equals a,t,g, or c
  SITE (3788): n equals a,t,g, or c
  SITE (3789): n equals a,t,g, or c
  SITE (3790): n equals a,t,g, or c
  SITE (3791): n equals a,t,g, or c
  SITE (3792): n equals a,t,g, or c
  SITE (3793): n equals a,t,g, or c
  SITE (3794): n equals a,t,g, or c
  SITE (3795): n equals a,t,g, or c
  SITE (3796): n equals a,t,g, or c
  SITE (3797): n equals a,t,g, or c
  SITE (3798): n equals a,t,g, or c
  SITE (3799): n equals a,t,g, or c
  SITE (3800): n equals a,t,g, or c
  SITE (3801): n equals a,t,g, or c
  SITE (3802): n equals a,t,g, or c
  SITE (3803): n equals a,t,g, or c
  SITE (3804): n equals a,t,g, or c
  SITE (3805): n equals a,t,g, or c
  SITE (3806): n equals a,t,g, or c
  SITE (3807): n equals a,t,g, or c
  SITE (3808): n equals a,t,g, or c
  SITE (3809): n equals a,t,g, or c
  SITE (3810): n equals a,t,g, or c
  SITE (3811): n equals a,t,g, or c
  SITE (3812): n equals a,t,g, or c
  SITE (3813): n equals a,t,g, or c
  SITE (3814): n equals a,t,g, or c
  SITE (3815): n equals a,t,g, or c
  SITE (3816): n equals a,t,g, or c
  SITE (3817): n equals a,t,g, or c
  SITE (3818): n equals a,t,g, or c
  SITE (3819): n equals a,t,g, or c
  SITE (3820): n equals a,t,g, or c
  SITE (3821): n equals a,t,g, or c
  SITE (3822): n equals a,t,g, or c
  SITE (3823): n equals a,t,g, or c
  SITE (3824): n equals a,t,g, or c
  SITE (3825): n equals a,t,g, or c
  SITE (3826): n equals a,t,g, or c
  SITE (3827): n equals a,t,g, or c
  SITE (3828): n equals a,t,g, or c
  SITE (3829): n equals a,t,g, or c
  SITE (3830): n equals a,t,g, or c
  SITE (3831): n equals a,t,g, or c
  SITE (3832): n equals a,t,g, or c
  SITE (3833): n equals a,t,g, or c
  SITE (3834): n equals a,t,g, or c
  SITE (3835): n equals a,t,g, or c
  SITE (3836): n equals a,t,g, or c
  SITE (3837): n equals a,t,g, or c
  SITE (3838): n equals a,t,g, or c
  SITE (3839): n equals a,t,g, or c
  SITE (3840): n equals a,t,g, or c
  SITE (3841): n equals a,t,g, or c
  SITE (3842): n equals a,t,g, or c
  SITE (3843): n equals a,t,g, or c
  SITE (3844): n equals a,t,g, or c
  SITE (3845): n equals a,t,g, or c
  SITE (3846): n equals a,t,g, or c
  SITE (3847): n equals a,t,g, or c
  SITE (3848): n equals a,t,g, or c
  SITE (3849): n equals a,t,g, or c
  SITE (3850): n equals a,t,g, or c
  SITE (3851): n equals a,t,g, or c
  SITE (3852): n equals a,t,g, or c
  SITE (3853): n equals a,t,g, or c
  SITE (3854): n equals a,t,g, or c
  SITE (3855): n equals a,t,g, or c
  SITE (3856): n equals a,t,g, or c
  SITE (3857): n equals a,t,g, or c
  SITE (3858): n equals a,t,g, or c
  SITE (3859): n equals a,t,g, or c
  SITE (3860): n equals a,t,g, or c
  SITE (3861): n equals a,t,g, or c
  SITE (3862): n equals a,t,g, or c
  SITE (3863): n equals a,t,g, or c
  SITE (3864): n equals a,t,g, or c
  SITE (3865): n equals a,t,g, or c
  SITE (3866): n equals a,t,g, or c
  SITE (3867): n equals a,t,g, or c
  SITE (3868): n equals a,t,g, or c
  SITE (3869): n equals a,t,g, or c
  SITE (3870): n equals a,t,g, or c
  SITE (3871): n equals a,t,g, or c
  SITE (3872): n equals a,t,g, or c
  SITE (3873): n equals a,t,g, or c
  SITE (3874): n equals a,t,g, or c
  SITE (3875): n equals a,t,g, or c
  SITE (3876): n equals a,t,g, or c
  SITE (3877): n equals a,t,g, or c
  SITE (3878): n equals a,t,g, or c
  SITE (3879): n equals a,t,g, or c
  SITE (3880): n equals a,t,g, or c
  SITE (3881): n equals a,t,g, or c
  SITE (3882): n equals a,t,g, or c
  SITE (3883): n equals a,t,g, or c
  SITE (3884): n equals a,t,g, or c
  SITE (3885): n equals a,t,g, or c
  SITE (3886): n equals a,t,g, or c
  SITE (3887): n equals a,t,g, or c
  SITE (3888): n equals a,t,g, or c
  SITE (3889): n equals a,t,g, or c
  SITE (3890): n equals a,t,g, or c
  SITE (3891): n equals a,t,g, or c
  SITE (3892): n equals a,t,g, or c
  SITE (3893): n equals a,t,g, or c
  SITE (3894): n equals a,t,g, or c
  SITE (3895): n equals a,t,g, or c
  SITE (3896): n equals a,t,g, or c
  SITE (3897): n equals a,t,g, or c
  SITE (3898): n equals a,t,g, or c
  SITE (3899): n equals a,t,g, or c
  SITE (3900): n equals a,t,g, or c
ttatgtatggtgaaaagttggggttcagtttcattcttctgcatatggctagctagttatcccaacatcatttgttacatagggagtccttttcccattgcttatttttgtcaactttgtcaaagatcagatggttataggtgtgcagctttatttctgggctctctaatctgttccattggtctatgtgtctgttttcgtacaagtaccatgctcttttggttcttgtagtctgatagcatagtttgaagtcaggtaatgtcatacctctgtcgttgttctttttgcttaggattatcttggctatttaggttcttttttggttccatatgaattttgtggtagtttttttctaattctgtgaaaagtgacattggtagtttgataggaatagtgttgaatgtgtagattgctttgggcagtatggccattttaacaatattgattcttcctatccatgagcatggaatatttttttttttttttttaatttatttttttattgataattcttgggtgtttctcacagagggggatttggcagggtcatgggacaatagtggagggaaggtcagcagataaacaagtgaacaaaggtctctggttttcctaggcagaggaccctgcggccttccgcagtgtttgtgtccctgattacttgagattagggattggtgatgactcttaacgagcatgctgccttcaagcatctgtttaacaaagcacatcttgcaccgcccttaatccatttaaccctgagtggacacagcacatgtttcagagagcacagggttgggggtaaggtcacagatcaacaggatcccaaggcagaggaatttttcttagtgcagaacaaaatgaaaagtctcccatgtctacttctttctacacagacacggcaaccatccgatttctcaatcttttccccacctttcccgcctttctattccacaaagccgccattgtcatcctggcccgttctcaatgagctgttgggcacacctcccagacggggtggtggccgggcagaggggctcctcacttcccagtaggggcggccgggcagaagcgcccctcacttcctgggcggggcggctggccgggcggggggctgacccccccacctccctcccggacggggcggctggccggtcggggggctgaccccccacctccctcccggacggggcggctggccaggcagaggggctcctcacttcccagtaggggcggccgggcagaggcgcccctcacctcccggacggggcggctggccgggcaggggggctgaccccccccacctccctcccggacggggcggctggccgggcggggggctgacccccccacctccctcgcggacggggcggctggccgggcagaggggctcctcacttcccagtaggggcggccgggcagaggcgcccctcacctcccggacggggcggctggccgggcaggggggctgaccccccccacctccctcccggacggggcggctggccgggcggggggctgacccccccacctccctcgcggacggggcagctggccgggcagaggggctcctcacttcccagtaggggcggccgggcagaggcgcccctcacctcccggacggggcggctggccgggcaggggggctgaccccccccacctccctcccggacggggcggctggccgggcaggggggctgaccccccccacctccctcccggacggggcggctggccgggcggggggctgacccccccacctccctcgcggacggggcggctggccgggcagaggggctcctcacttcccagtaggggtggccgggcagaggcgcccctcacctcccggacggggcggctggccgggcaggggggctgaccccccccacctccctcccggacggggcggctggccgggcggggggccgacacccccacctccctcccggacggggcggctggccgggcggggggccgacccccccacctccctcccggacggggcggctggccgggcagaggggctcctcacttcccagtaggggcggccgggcagaggcgcccctcacctcccagacggggcggctggccgggcggagggctgacccccccacctccctcccggacggggcggctggccgggcagaggggctcctcacttcccagtaggggcggccgggcagaggcgcccctcacctcccggaccgggcggctggccgggcagggggctgacccccccacctccctcccggatggcacggctggccgggcggggggctgaccccccacctccctcccggatggggcagctggccgggcggggggctgaccccccctcacctccctcccggatggggtggctgccgggcggagatgctcctcacttcccagatggggtggctgctgggcggagaggctcctcacttctcagacggggcagctgccgggcggaggggctcctcacttctcagacggggtggttgccaggcagagggtctcctcacttctcagacggggcggccgggcagagacgctcctcacctcccagacggggtctcggccgggcagaggcgctcctcacatcccagatggggcggtggggcagaggcgctccccacatctcagacgatgggcggccgggcagagacgctcctcacttcctagatgtgatggcggctgggaagaggcgctcctcacttcctagatgggatggcggccgggcggagacgctcctcacttcccagactgggcggccgggcagaggggctcctcacatcccagacgatgggcggccaggcagagacactcctcacttcccagacggggtggcggccgggcagaggctgcaatctcggcactttgggaggccaaggcaggcggctgggaggtggaggttgtagtgannnnnnnnnnnnnnnnnnnnnnnnnnnnnnnnnnnnnnnnnnnnnnnnnnnnnnnnnnnnnnnnnnnnnnnnnnnnnnnnnnnnnnnnnnnnnnnnnnnnnnnnnnnnnnnnnnnnnnnnnnnnnnnnnnnnnnnnnnnnnnnnnnnnnnnnnnnnnnnnnnnnnnnnnnnnnnnnnnnnnnnnnnnnnnnnnnnnnnnnnnnnnnnnnnnnnnnnnnnnnnnnnnnnnnnnnnnnnnnnnnnnnnnnnnnnnnnnnnnnnnnnnnnnnnnnnnnnnnnnnnnnnnnnnnnnnnnnnnnnnnnnnnnnnnnnnnnnnnnnnnnnnnnnnnnnnnnnnnnnnnnnnnnnnnnnnnnnnnnnnnnnnnnnnnnnnnnnnnnnnnnnnnnnnnnnnnnnnnnnnnnnnnnnnnnnnnnnnnnnnnnnnnnnnnnnnnnnnnnnnnnnnnnnnnnnnnnnnnnnnnnnnnnnnnnnnnnnnnnnnnnnnnnnnnnnnnnnnnnnnnnnnnnnnnnnnnnnnnnnnnnnnnnnnnnnnnnnnnnnnnnnnnnnnnnnnnnnnnnnnnnnnnnnnnnnnnnnnnnnnnnnnnnnnnnnnnnnnnnnnnnnnnnnnnnnnnnnnnnnnnnnnnnnnnnnnnnnnnnnnnnnnnnnnnnnnnnnnnnnnnnnnnnnnnnnnnnnnnnnnnnnnnnnnnnnnnnnnnnnnnnnnnnnnnnnnnnnnnnnnnnnnnnnnnnnnnnnnnnnnnnnnnnnnnnnnnnnnnnnnnnnnnnnnnnnnnnnnnnnnnnnnnnnnnnnnnnnnnnnnnnnnnnnnnnnnnnnnnnnnnnnnnnnnnnnnnnnnnnnnnnnnnnnnnnnnnnnnnnnnnnnnnnnnnnnnnnnnnnnnnnnnnnnnnnnnnnnnnnnnnnnnnnnnnnnnnnnnnnnnnnnnnnnnnnnnnnnnnnnnnnnnnnnnnnnnnnnnnnnnnnnnnnnnnnnnnnnnnnnnnnnnnnnnnnnnnnnnnnnggaaaaaaaaaaaaaaaaaaaaaaagaaaaaaaaaaaaagaagaaaaaaaaaagaaaaaaaaaaaaaaaaaagaaaaaagaaaaaagaaaaaaaaaagagagaaaaagaaagaagaaaaaaaaaaagaaaaaaaaaaaaaaaaaaaaaaagaagagaaaaaaaaaaaaaaaaaaaaagaaaaaaaaaaaagaaaaaaaaaaaaaaaaaaaaaaaaaaaagaaaaaaaaaaaaaaaaaaaaagaaaagaaaaaaaaaaaaaaaaaaaa

SEQ ID NO: 283 - DNA, 756 bp, Homo sapiens; identical to SEQ ID NO: 280

SEQ ID NO: 284 - DNA, 25279 bp, Homo sapiens
cttagcttcttccaaaggagaccatctgaccacaattttctactactgcagaagcattgctgtgaagttccctttcccagctgcctccactaatctgcaaaaagcactttctaaagcactggaaaggtagggttgtttggttttttttttctctttccaagaggactttgtaacctggagccttaattcctcataatttggtttacagaaaataacggcctatgcttctcttatttctaaacatatagatttttcataatttgtgtatagtcactgaatttcatccaatcaatatctgattcagtcccagtaaaagagtacacaggctgttaatactgactcatcttgagtgtgttgcagttgaaaaatcagtcaaatacagctcttttgtgtatcaagtatttagcaagccagtgcctccttaaacagttgtagccaatttgctgcttatgattcatggaatttttttctttcatttcagccgagatgaggtgaaaaccaagtggggtgtttctgacttcatcaaggcctttattaaattccacggtcatgtgtacctgagtaagagcttggaaaagttgagccctcttcgagagaaattggaagaacagtttaaggttagatttcagaaatagagaatttttgtcttgtctaaatcaggaagcataacatttggaggaaactgactcccagtttttgtagttacttaactgtgtgaactattggtaaaaattatattcgaagtatgtgaaatctttgcatttatcatcccttcaatttaaactgaggtacagtctgtataaacaaatataatatagcagtgttttcacttgagtagttgccatttgacaaaaattatcaaagtggaaaaaaataaataactcctcagttttgaaactactactacttttgatggtttgtgtattcttagatatgattatgttacctgctttatagatattggcattctccaaaccaagttcattatttttattgtgcttgcattcatcaggattgtggtagtttgaatgaaaggaatgagagtttcatttaacagggatatattttactaatttgaagagataacattaaccttcattctatttatatatgtgaaaatgatcttttattagtatgttaagatattagcagtttaaatgtataatgcataaaataaggagaaagtcaaaagtattaactttttttcagttcatgtattcaaataaatatttgactactcatcggtcattgttttaggcactgtgttaaacagtaaatgacaatttcaaagaacattttatatttcttggttatttctaggtatctatatacttgggtaattgtgtataactgcttcatagtatttctgtaagttctttataagtcaggcattttaagagattgtagaacttggacagttaaggtgtcacttagccaaaaatagtcaatgcgaaatagtttttacaggtaatcgctttttggttgatactttctatgtgcaagatattagaatagataattataaatagcaatagtttgttttgttttaaaatatacttagcctgtgacatatgatgtataaggttgggtgtgtgaaaggaacagctaactttgtcatgtcctaggctgttcagcctggaaaagaacaaacaagtctaaatagttttcatagtaagtattcagacatgtgaaggattatttgaaaagaacatacctgtatctttcctgaagtcaaaactaaaatcttaaattttaagttgaaatctatagggggctgaccgtgggatgttgtggattctccattttggagagcttaacagtcagattgacagccatctttcttggattatttaagtgcagtcctactaaataggggattggactagaaaacttcttgagattgcttccagctctggttctgtgaaatactctctaaattggtggtggtgggtggtccctaccttaatgagatcttcactaactaagttattctagtctaaaaacctagtaagttttgcatttggttcaacctcaaacactaacactctcttcacatatatatttctgtatgtgaagttctggtaagtgtgggtgggcagtttctaaaatatactttgaagtatcattccagcactctaaagttaaacataaaacatagtatgaggcagatctatttgaaagcttacccagtgttgaactagaacattgctggagtgaaattttaacatagtggagtaaaatttccaaagtatttctaaagcatatgtagataattagtatcatcaacatgtatacttcagtgtttctaacaacctttagctactaagcagaaatgtttaccaagttgaggtccactaagggatttaaggcctgggatctgggaattgagatgtaatacattttctgtaagttaaatgtgggctgtttgttaatggtatttatttcagtatatttctcaactgtagttgaaagtttgagtagcaaaaatcttatcagttctaatctgactttattccttggaagactctctacaatataatctaaattttaggaaattacaactgaataacttcaaccttatttctgaatggataggttgttcattcactaagtgtttattaagtacccgctatgtaccatgcacttttctaggcttttagagatataggggaaaacatgacaaagtctggaccttcatgaacttatattatcatttgttagtactagggtgtattcatattcattaatacttctgtgcatacgctagaaaattctttaatgggctgtgaccctcttcagtaggatattgccttctaaaattaatgccagcggatttatagatacaggaaatacattaccatattgtgcttgtaagaaactgctttttgagaaatacaactacatattctcattttatgccagtattatttgaataaacgccagctgatttagaaggttagttgtagaaactgaaggagaaattttgtgggaaaattctagagaagagacaggatttcaggaaattttgaggaaagattaatgcttgatgtctttggaaaagggctaatcattctagacatatacaatgaaatagattgcaagaagactgacagtgtgatagaaagagttcatgtagaatggaattatattctctaatgataatgtaaaagacttccctcttagaatcgtagagcttactatggctatttcaggttctttatgtaaataaaaacaaaaatctcagagtagtctgggcagagacagctgtaagtttctgacatggtaggatctcctgtcactgctggtagaactgtaagtaaggattatctgttttccgccataatgctagtgataatgaatccctgctctctgcaaaaatttcccctgggcatagaggaagactggctatggctaaagtgtaggatgaaactaggaacttctgttagaaaagtatttttgcctgcaggtaatctaaaataattgcagatattaaagtagaagggtaattccattgagacaccaactgagagcatctgggtgattttttatagtgctggttaacagatcactgtgaacacagttattagaaggtaaatgaaatttgatgatcacgcatgtacttctctaagaggggaaaataccagttgataatttgtagaagtacctataatacatcctaatgttgttttagtatgccatttaccctgtgttccagaatatgtacttgctatgccttgtttataaaataagttttaatgtatcaagcctctgaaagagtaaattttatgacaaatctgggaagtcatgctttatgtactgggagttcaaaaaattattttttgagtctgttgctttctagtcatttgtcccaacttaatattttaatatgtatacatcttgtataaaacaatttctaaaggattaagttgtataaatttatggatgaacactcaaagacttttgtcaggtcatatttaaaaatatatagtttcctaggagaaaaaagtttgttgataaacaattcaaacaactctgtggtgtctagattaattcctttcaagacaaaaagtcagtttgggaaataattagacccagtcaaaatactgggattgagggcagaaccatttactcatctgtaattctattacacatggtggttctaaatgcagactaccagtttaatttcttgtgtcaaagatggttcctgttcttgataatatatgcagtacgtctgtcttcttttacagaggctgctattccaaaaagctttcaactctcagcagttagttcatgtcactgtcattaacctgtttcaacttcatcaccttcgtgactttagcaatgaaaccgagcagcacacttatagccaagatgagcagctatgttggacacagttgctggccctctttagtgagtattgaattacttaacatgtgccatcttttttgaaaaacatcatcttaggcatttcatcgatgtagcaaagcacagtgacataaaaaagcatagtgtatttcttacactgaatcaggagttcataataactttcaaccccaagttctatccttttatctgctgataccccctcatcaagttgtaactataacatttttaatatgggaaagaaagcgtctttttagaaagaagctgtaagatactcaagtgttaaacagaatatagtagaaggcacataatattttaatttgaactggcacagtttcatatttcttatgctttttgaatacatttttttttcaagtgtcttttcttggcatcctgtgcaagtgtcctctacagaatgagtctcaggaggagtcctacaatgcctatcctcttccagcagtcaaggtctccatggactggctaagactcagacccagggtctttcaggaggcagtggtggatgaaagacagtagtaagtatttttagaatttcatgttaacttgtgtgctttgtttgtttgatatccataaatatgtaaaaactgccttctaaaatacaacatttgaacaatagaatactgtattttctgccgactctcgggaattgaactgaagacctctttgtacgcttttcatttgtttatttgaattcttcatgtgaggcttatttttaaggatttgtgactccttgtacactcccttgttcccagttgctgtcctggggaaaaggcatttttcacatttcaaagtgaacttgaagtaaaaccagtttgtttcttatctattacagtattccttaattttttgtttgagttgaagggaagagatttttattccatttttttctgtacatgaactgtttgatgttgccttacagtaacactcaatttgaataatatttgtttatttgaagcataaagattgaaagttattttgattctcaccattttctctgtcatctctactcacagtaattctgacagctcttaggaaccattgattttacaatgacaaatgaaaactttcagtgtacctttgattatagaaataaatacttccaaggtggcttggcaccaaataggaagttcctcccctgcatattttgatggtatatttaaggagaatctctttgaaagttttgctttgtggcccagcatgtatattgaccaaggtcacaacttagaaaatgccttttttaagccacatttaagaccctgtgggccaagcactgtggctcatgcctgtaatcccagcacttggggaggctgaggcaggcggatcacttgaggtcaggagtttgagaccagcctggccaacatggtgaaaccccatctcttttactaaaaatacaaaagatattagccaggcattgtggcatatgcctgtaatcccaccacttcgggaggctgagacaggaaaatcgcttgaacccaggaagcagaggttgcggtgagctgagatcgcgccattgtactccagcctgtctcaaaaaaaaaaaaagaaagaccttatggtctgtctgcttcataattgtcttttctctcatgtagttataagctctttccatgatatattgacattatcatgaatagagtttaggaacatagcacagcatactatatacatctccttttaatgttagcattggttttagtaatacggattttcagacattgcttccttgcataaaatttttatttcttaactcaggctatacagtttttctactcttgtgtactctagaactcaaatttatgtttaattcaatatattatatcagtaatgttacaaaagaagaactgcatgttttaccatttgcttatagagtttttatatttatgggtaggaattgttattttcattgtgttttgttttttcttattgttgttcttgtacagtgatccttttggcccattctgtgtgttcccatttcttctcatggcaaaagatgttgaaccagaaggaacagctttattggcaaacattttttccctccatttttttctgtcatttactctttccacttcctcctatcagatttaccaaaatctttagaattatgcccttgtaggtgtttgattctgtgttaaattatgttagtactcattttaaagactagcatgggatatcactttaaaactgaagatttttccttgtgtgtctaatacactaaagttataatgttcatttatatcttttaagtaatggaaaaacaatgactgtttcttttgtgaactcagaattttatgtatattcaaataatcttcagtttcttatatctgggccttctcaatttctagaatttactttcccttgtacttttttgagaacatactctcttaagctaatgaatacatggaatagtgattttcctttgtagaaaatagttatagggtaaagcagtatatcattaggtaatccactcatgcgctttttctacagtgttttctcgagagcttatgtgtgttgcatgaagacattgtacagtatagtattctcttttagtttactgacctttttttccaactatctcttgtaatctgttacatctccaaaggtttgtagcagacgtttattcttcaatatttgtttatatatttttaatatgtgtatatatttgttgatatttttaaagtagcatattcccatatttcagagtgtacaactgtcccaaatagttaacttacaattttccgtagtgtgattatttacgtccagtttctctatcctgggcacttcacctcatgcttttctttttctttctttcttttttaataaaaattggttgatacatattcagaggtaagcttcatattaaggagaatgtgattagacagatgagtctactgtaggaaaatcaaagtaattgtttccaggccaaaaccaattattttaagctaattactttaaccaaataattttaagcaacatggctacttccacccatcacatctattcctcaccccagcaaatgaacactcaaactacttggatttgtctcacttcaaaaatcttgccctgtcatatataatacatcagatttataaattgctcttatgtttgaaagataacagagattttgatacaaatgtttatatgtaaagtgatatttataaatctgtatccataatggaaactttaacatacctcactcaggaaccaaggacacagttaacaaatacatatatagtacgtacttctgaatagtggaaagaatatgttctaatatttcatgtgtaagctttcacaaaaattgtgtattaagaaacagagtttagagttaaggcttttgtaaaaatgtggactttttgtaccataaaaaaagaggcattatcactttgaacagggaatgtgatttgtgtggtataaccataccctgtcacagattaaagaactaacagcggcttccacaactcataatgtatgtgaaagctctataaaaacatagtatgttatttctttgctcagaattttctcagcctatttcagttttccatgtttaaaactgacaaattattttcaccatttgttgaattaggagcatgggaaatgatctacagtggtagtaggtctctgtcatggaaatttgtcccttttgttgtatctttatcattatctagtgtatctttgaaagtacatttttaaaaattatacagcctttgaaatgctgaaataagggaaaaatacataaagtccaggacctatagataccattttcatggcttattagtgttctggtttctcttacataaaaataaagtctgaactctttctttaatttacagcatttggccctggttgatttctcttctgaatagtttccatccccatgaagaggacctctcaagtattagtggtaagggctaccctaaccttgtgttgttgatgtggttctccatcattaatggtggcttaatgccagagaaaaagaggtttttggtgatgaatgattgattttaaattcagtatctcagaagtgactgtgaactctacataagtgggtgggtggaagtagataatgttctcccagttcttctggcagcttattctcatttagcatcattcaaataggagttcagagagtgtaataccttcagattctttcattccttcctcctcattcttactattttaaaaaaagcaattaacatgaacattgctctgtcaaagtaatacttactcatcgtagaaaatttggtacaaagaaaaagaacacaaatctcccatacagagataccttttactagtcacgatagtatatcttcttcgggcctttttcttacgtgtgtacacacacacaggaaatgattcatatcaaataaagttttgtgcctgattttgaaatttggtattatattgttagcattttcttttgtcattaagcattttgaaaacatgacttttactggcttcataatattccatcctatggaagtgctataatctatttacgcactttctgttgctttaaaattttccccattataaataaataatgctgcactgaacaacctctggcttggcttctttctgactttttttttcctcttaaatccatgctcctcaggcattaatttgcacataaatcacctgaatctttttaaaatacagtttatgattcagtaggtttgaattagtgcccaagattctgcatttcttacaagctctcagatgatgtcaatgttattcaatactttcagtaaaaagagacaggtaatctaaacattgggcttactggatccaagactatgaatttttaagactgctgattttttaaaaagccattctcctcagcattgagtattaggtgagtgttaggggaatgtctgtgtcccaaagataacatgcagagttttgacaggtgagttattttcatcaggatcatgataaagaagagcagagaacaataagcattataatttctttctgtatgttaatttttaaaaaaatttagtgaacagtattccaccaaacaacattttaattaaaatgtttgcaaattttgattttgaccctttagcgacaccacttccagaggagtttgaattacaaggatttttggcattgagaccttctttcaggtaggtgatagctgaagtacctttatcattgccagtgattgcagtattaaaattagcagagaattgggcttggatgtagaggaacctttgatctgtcccagctgtgtgttatttttgtaacgtcaactaatactgaaagttgttgtgaattggatttgtgtatgtcacgccttcaattcctgtgtaataaaaattaaaatgtaacctttccatctgtgcccttgatcccatcccttctcacctccctaagaaccttgctccatctgttatcctctctgcattgtatttccagtgtcttgtctttctttcctttcttttttaaacaactaattatctttagcctagtaacatttaagtgtgccccattcttttaaaaaggtaaaatgaatttacatccctctattttcctacgttgccttatcttttcatcatcaaacttcttaaaaagagtagtatgcactttgggaggcggaggcaggtgaatcatgaggtcaggagatcgagaccatcctggctaacccggtgaaaccccgtctctactaaaaatacaaaaaaaaaaattagccgggcatggtggcgggtgcctatagtcccagctacccaggaagctgaggcaggagaatcgcttgaacccaggaggcagaggctgcagtgagctgagagatcacgccactgcactccagcctgggtgacagagtgagactccgtctcaaaaaaaaaagagtagcgtgggccaacctgactgactccacttcaactcctgatcattttcagcctactgtggtttaaactatcagtgccttctagataccaaaatccagtgactatagtctttatcctattgaattttcttcagcattgagtccgtcgatttccttccttcatgaaacctttttccttagctctgtgatgcaatttttcccacccttagcactcagtctttttcactatttcttttaaactacatgcctctgaatgttgttgttttccaggattcttttcttgccctttccttctcactttgtacattcaccctgttaatcaaatccatccctatgtctcttgaatggtatgtcccaaattttcagctttgacttctcttgaagtttggatgcatattctaacaatctgacctcccttacgcattttaaactttaacgtgaccaaaaactgagcttatattttccgatttggtcagccaaaaagcaatcttctttctctattttctgtctgtgcctgtggcattacccatctatatgaccaagctagaaatctgaaaaacccttgtttctatttgtctttctcaccaagcctttataattatgtgtctgaaatgcttcttaggttcaagtccttccgtttatttccctatacatagttcaggcttttctcaccagtttacctgaagtataaaaaccttcctacgtatagttcttctcctcctatagtctgtttctacactgcctatagtttttaagtatggaaatagtgatgttgcatgactaatatttttatttacccattcccagttgctccactgtctcttttagcttgatgctcaagttccagcactatccagctcctagttgttcagccttattttcttccatttcccccagtatttataaactctatacactatgtgctatacttgaatagctccctatttttattcctccacacctttgttcatgttgtgcctagaacatttccttctcctctactgcccttccatcaccagcctggtaagcacttagccatacctgtcaaggtccagctcaggtatcactctatgaaacctttcagagcttctcagaaggaactcatcctccttttactatattcacttaattctttacatagttcttattatgcttatcagattgaatcataattatttattcccaaaggtagggactcttatttatctttgtgtcctcagcatctagccttctgcctggcaattcttaaatcttcttaaaaaaaaaaaaagtttaataaggagaaatctgaaaaatctttattttttcaggttggtttacccttctgatatcaatgagttattctatatgctttacgatatttatacatttttctgatttagaatggtccaccacaaagtggatagattaatattatttattaaaataggcacctcagagactcttagcattgccatggtcatttcaagcaaattacttggcatgcaagataaatgtttataaaactttattcttaaaatgataaaagaatctttcctaataaaaagttgtggtttgtttgagctccctgactagaaagtgaaatgtgagtaaaaatattacattaatgtaatgaatttgtatattttcttttctgctttgtttcatagtttgtaaaaatctctggtagtataaattctaataaatgcagttgattacatcaagtagctaacctatgtgggaagtaatctgaagccattacagttaatcaggtgaacttggttgcctggaaaatatctttagcaatttaatattctcataacttgcttgtgtcaattttaggaacttggatttttccaaaggtcaccagggtattacaggggacaaagaaggccagcaacgacgaatacgacagcaacgcttgatctctataggcaaatggattgctgataatcagccaaggtaagtctggaacttctggtctacccctttttaaccacctttttagataaacacatgcgcgcacacgcgcgcgcacacacacacatctcatatgttacgtattttaggctttggtataaatattgtcaatcatgaactcttaaatcgacatgttggtagcacaacatctaattataaccctagtgagtaagtatactctttatttagaatctctgttctccctattgtgtattacagaggtctttcttgtttatcgtgagtttctgctctaatttataaatatctctgtaaatctaactgaactgtactttcacagtcatggtaatttgtattggcctgggcatggtagtcagtttcaggcaggacagaccaagatcgtgctagtagccagttaagtacaaagcagatgtggtcgttagtgtagggaaaagaacgcaggttttgtaattccattggtttgagttccgtttcgagttccgcagcttctcaagtgggtgtccttgggatctccccagtagattataacctttccaaagtcactaactacttcctcatttttgtattcaggtttctgtcatacagtaggtcgttaaatgcttccatgtttgaatgaacttaccacctccaagcttcaattttcacatctatagaataggaattatatatagctaccttataggacatatcaagggccctagaccagtgtcttgcacttgaagcatgctcagaaaatgtaaattctagcaaacgttgaaagagccagagggataggttgtgacgatgttaagtgtgataatgagaacctcagtttctacataactactttttgtgttacctgaatccacattgttatatcctgctgttttcatggttattagtgctaggaatatattgacttggatccacacacaattcagttgttattttttaagttaatgttttttatatatggatttatttttgcttttttaggctgattcagtgtgaaaatgaggtagggaaattgttgtttatcacagaaatcccagaattaatactggaagaccccagtgaagccaaagagaacctcattctgcaagaaacatctgtgatagagtcgctggctgcagatgggagcccagggctaaaatcagtgctatctacaagccgaaatttaagcaacaactgtgacacaggagagaagccagtggttaccttcaaagaaaacattaagacacgagaagtgaacagagaccaaggaagaagttttcctcccaaagaggtgagaagggactatagcaaaggaataactgtaactaagaatgatggaaagaaggacaacaacaagaggaaaactgaaaccaagaaatgcaccttagaaaagttacaggaaacaggaaagcagaatgtggcagtgcaggtaagctgtatttgaactataaagcaggtagaggaaggctcacacaaaaggcaagatttttcattttgttctaaagccatgagaattggccgtcctggaagtttaaatgcattatttaattgcatagtaaggttatataaagagctgtgatagatggttactttttcaattcttgggaattgtgagtgaaaaaaaaatctcagcctgatttgacactttcgtcagtcttcaccaatttaagcagtttgaaaggattagttgcagagttgtcagtttcacacaggattatattttatttagaagatataactaccatttgtcaatgctatagtggagatttggggtcttctgtagatccagtagaaccaagagtatattaaggcttatgcagtttttttttttagattcactataatatatatatgtgtgtgtgtgtgtgtgtgtgtgtgtgtgtgtgtgtgtgtgtgtgtattttttttcttggaaaaatatgagacttttttattgacaattatacttgtcccggctattggtattaatatcactttaatcttatcctggatcctgggaatttataaaggaagaacccaggtttcttgctgggaaaagataagcactgctcagttatttgtgactttctttttattaatatattttcccaaatagaaaagatggtttcatgtaaacagaaaagggcctttattctgtgatggttttattaatactattaatgtttgaataaatacttaagcagccatgtgagttgttaacacattttagcaaatgtatgtgtttgcatgagaaactttacattgttgaaggctgcttacaaataaatagtacctttgaagtatttctctaatttttttgagaaagagaaataagaaaataatagttccattttaacattatagcaaggagagaaacagaaagacaaggtagaaattaagacataggggagagagagagatgctagggaaaggcaagaaaaaaaaaaatgaactagaaagccaaaggatccgagttttagagataatgagtccagcattttctgtttacctttcctccattctctgtaactgctcacaataaggtccagactgaaaatacaatctccttttttggtttctcatccatctcaaatcacctataaatgattaaagaaagaaagagtaaacatatcaccacactctgtacctcgtcccgggttttctataaatgctactcatgttccctcattttgctcaactttgagcagtgcatatgacatctactctctggctccatctataggatctcagggcctgttccttactgctgaaagtatccttatttattctgaagggtggtaaagttgcagggtggaaggtggatgcctgactgcacatatggctacccagatgaaatcaaactgagggccaaaataactcacctatgggttaatagtcattattagttcataattcatgtatgtcgtttaatgaattagagtatagagaaccctgggccccagaacaagcaacttaaagtcatagacaagtttttttcaacttgttagcatcaggcatctcatttgtaaaacaaatgggctctaaggtcctttacatttttggatttttgtgatcatgggaaagcaaaataattagtaaaactaagatagtaaaattatcttttattggctattaaataatttgctttgattttccatttttaacttaggtgaatttaaatatcttcagcatgtactttttgatctaatgaggttttaaatactttcttaggagtagggtcttctttctagcacatttgagtttcaatttattatagatagttttgcttctattggttacaggtaaaatcccagacagaactaagaaagactccagtgtctgaagccagaaaaacacctgtaactcaaaccccaactcaagcaagtaactcccagttcatccccattcatcaccctggagccttccctcctcttcccagcaggccaggtaaatatgttttgtaatttcttctacttaatcttttctgtgcaagaatttctattcagtcactgagaaatgtgttttctgttggagtaatgttactaagccataaaaagttctattttccctaatacttataaaattatttttgaactgtttgtgtgtagtgtacatacaagtgcatgtttgttattatgaaggaaatcctatcactaaatacagaagctactcacagaacactgattacttcagtggatagaggaaaaatatcaagtctatttttagttcttcaaatcaagttaaagattgacaacatgactaatctcttttgtgatgtgttagaagactccctctacctacctgttaaaaaaaaaatgactttttttgcaattttttgctgtttccttaaaactaaagctgtgttcttctgttttgaagggtttccgcccccaacatatgttatccccccgcctgtggcattttctatgggctcaggttacaccttcccagctggtgtttctgtcccaggaacctttcttcagcctacagctcactctccagcaggaaaccaggtgcaagctgggaaacagtcccacattccttacagccagcaacggccctctggaccagggccaatgaaccagggacctcaacaatcacagccaccttcccagcaaccccttacatctttaccagctcagccaacagcacagtctacaagccagctgcaggttcaagctctaactcagcaacaacaatcccctacaaaagctgtgccggctttggggaaaagcccgcctcaccactctggattccagcaggtaagttacagttgtgtgtactatccagctgaatgaaataaggggaaatgctgaaagattcaatgttagaaatgctcattaaactttgacatacttcttgcttagatttatagtgattatgggaaaacaaaagtattgtctctactgtttatgaaagttcaaatgttttccttactcttgtaaaggataaaatactagatcttaagtaccattcttggctgctactaagtgtccattttattgaaaatggattttctgcaaataattctcctataggaacataaactactagggaaatagaatcacagtcttgatgaggtgctaagacagatgtgacaccaatcttaaatgttgtcgttggaagcacagcacttgaagcagaaaggggaaacaaacactcttatgcaaatatattcattcattcattaaacctcttaaatagttgaattaaaagaaaatatgagtgtggtgcccataatctgtttccaaaaagctctgagtattgaatagcccaaaaggtaaaggaaactgctgccttgcctagagttttgttggttggaaaacaccccaagttcattctgtgattctttagcattcattataagtaatattgcattttatcctcacctttatgacaggcgtctcttttttagtatcaacaggcagatgcctccaaacagctgtggaatccccctcaggttcaaggcccattagggaaaattatgcctgtgaaacagccctactaccttcagacccaagaccccataaaactgtttgagccgtcattgcaacctcctgtaatgcagcagcagcctctagaaaaaaaaatgaagccttttcccatggagccatataaccataatccctcagaagtcaaggtcccagaattctactgggattcttcctacagcatggctgataacagatctgtaatggcacagcaagcaaacatagaccgcaggggcaaacggtcaccaggagtcttccgtccagagcaggatcctgtacccagaatgccgtttgaggtgtgtgttctttcctatcaccaggcaatttggagataggtctgaggttgactgtcttttgaatatctcaaatagatcttataaaaaggccactcttattcgttagtactatagaatgccactgagtattggtgtagctcttggtttcctcctcagagttgcacagtatgttttagtttggaagctgaagaattccgtaactgattttgaactctgatggtctggcaaagaaaccatgtacagaaatctctaaaacagcatgttagagaattctgagacaaagcactcctctcagttgggctgagtcatctaagtttaaaaataggtttactgatatttaaataaattgctctctgagaggaacaaggttagccagttatcttggacagtggaggtccctttctttgccctttttattcatgagaaacaggtgaatgttagtaactttttaaaagatctgtttctctgttagcacaagatatgctaatcattttgctccatagcattgttttactcactagccacattaaccttttgtgttctgctctgtcagtatttttgcttttctattgtcttgaactttctccattattgtccttgtgtcgctttgcctttgcatttcagagccttttttctctttgcctaataccatctatctcactatccccttgactttagttgtcttcttccacctaattatgctactattcctttatgcttttgttatcccttattgcttctcactgtgatgctttctgtcactaggaccccaagagctcccctctgcttcctccggacctgttaaagagtctggctgccttggaggaagaggaagagctgattttttctaaccctcctgatctttacccggctctgctggggcctctcgcctctcttcctggacgaagcctttttgtatgtatttgacataattctgcttcttggtctaacccccagctgcttctctgagatactgtagtacacagattaggtgatttcttctcttcctggggctgtccttttcagaactgtaaaacatattttctaattgcctaaaccaaccttaagttggtagtaggatatagcaaaacatttctgcctttatagttctcccaaatcatggagacataccttggttttatgtgttatccagaaagcattctgcagagctggtcacacacacgatgtgatggtgacaaattaactcactttgcaggtgacacttccatctggacccagaaattttaagtatcatttaatcttgcttaggaacagtgagatttatttctcatatgtagccaaaatatgaaaggaaatatgttcttgattttttttttgactgacattactgaacagtatatggctcttttttgtttggttaactaaatgcagaaagagccctgatctaaattcaaagttggattcataaacagaatgagtaaaaatgaagaggattctatttataaacattgtcagagtgtcataaatgagtaaatatgaaaataactagaatcacataaaataaaatctgagaactcagcctgcatttcaaagaacatcattctatatgcttgtcagtgttcatattatattttactgtgggtggggagtataaaagatggaaagaaagatgtatgctatgaggctttttcccctctctttattacaccttaataaaacataaaaagatagtaaattttactttcttgctgtttctttctcataaacacagggcaagaacacattcgtaaaattaaagtacattaattttagtgtcaagagaaataaaaccttaacagctttcatgacattgctgccatccctggcacttgaagttcccttaagaatttgcctgggtagtagcagtaggggccccataccaagttattaaataatagcaataaaagatccccctggagacttaaatggtagcagtgccatggctgagcgcacagggattgtggaagctcagctgctatactgttgcctctctatgtttgcctttcttgtggcttttatgctagagtggctttaaggactgagggtagtgcttctctgtctacttgtttcctaatcccttagttcctgttcctgttcccttagtgtccctttcattggaaatggagctgatggtagaacaagtgggagtattttcagggtttttttttcatgtttaaaagacaacaatgaataaaaaaaacttcgactataacccttccaatatttaacattaatgatacaacgtatgtcaaagtgcttctcttgtcgtaggtatttagtaatgttttattagccagctattcagtgacagcattagagattcagctttgtttctcctaataactttgctagggccaataaatgtaagcttgacttttagcaactgttttactatatactgcaaatagagctgcttaaaaagcatattaacaaagccatttgtcaaatggatttgaaaggctttttaaaagtcaccaatgttaatgttttaaaaattgtggggtggagagaaacagtgttggaacagttcagcgttttgttttgagattaagtgcaactattgacaaggggattcctgaggtccatgcctcataaacactcagagtgctgtttaccagggtctctggtccctgccagaatataatctctgactaggtttgatctaaaaggaggattctatgcacctgtggcaactggcacttaggcggtgtcttggtgttaacagatttgaattcacatcttctgagcctcaaattgtactcagtgggcgaatacaggcatgcttttgctttggttccatagtatggtaagattaatattaagaaaatagaaggtataacttaattacctttttttctgggactgtgaagaaatccttattggagaagccctcagagctcatgtcacattcatcctctttcctgtccctcaccggattctctctcaatcaggtaggtgaacaatgaagaatcctgctgtgtgcttttagtgtagactgatcattgtctttctcatactgtttcagtatgtctgttttttctttattttccatgtattagtgtattccagatatttgattttatcccccttgtctctgattggggcatactagtgacttgtacatcatgaattaaaaccctttaacttctcattaatattgaaacccttagggctctctttttgagccaaataaattattcacattttcaacctggatagtttacacagagcaaatttaagggtgagagaaagcaaagaggaaaattaatttgactggaaaattgaaacaaaaagaaataaaagccttcaaaatttctcttcctaagaaaagcttaaggtgtaccaagcatccatgaacaagacattggattttctcaaatctctttccttggggtgagtttataacttcactgtcatgtctttcaggaaagatacccaaataatagtatgttcaatgaggtatatgggaaaaacctgacatccagctccaaagcagaactcagtccctcaatggccccccaggaaacatctctgtattccctttttgaagggactccgtggtctccatcacttcctgccagttcaggtattaactactctttaaattatagaccttacatttcctgtacactcagattgattaagggatagtgagattctgtaattacaaatatatcatttgttgggttatttttattttttgtttgtttgtttttgtaacttctgaaaggaaatagaaaaaaaaaaagaagaagccggtttatgtaataaatgctactgacaaaactttttacatcctcagtagccagcagagatgtaagggagaaaatagaggttctatcttatggttctcagctgctttttagttttatttgtaggtgttcattctttgcagaaaaattgcacttttttttttgagacagtgtcttgtggtgttgcccactctagactcaaactcctgggctcaagcagtccttccatctcagcctcccaagtagctgggactacaggtgcacaccactgtgcccagctctgcactttttaaaattgagatttttaacttagagtctgacttaatagtaattcttaaggttagcaaattctttctgatacataagaccaataaacatgtatctgaaatagccgtgtgagaatagggcattcattcagttgacaaaaattgcctactattttattttgcttttttaaggcgaagaatatgccttagatatgtgtggcagggcaaattagtgcatctagcagatctctttggagcctttagtttccctttccttcaaagccctgtggttattgttagtagaattttagtgatcagatctacaggaacctgtagttctttgtatgtttgtgaaacaatgatttactatatcctgtgttgctattatttaatagatcattcaacaccagccagccagtctcctcattcctctaacccaagcagcctacccagctctcctccaacacacaaccataattctgttccattctccaattttggacccattgggactccagataacagggatagaaggactgcagatcggtggaaaactgataagccaggtgagatctacatttcattgccaggcaaaattgaaagaatttactctatccttccctggggtctggcaattggcagtgatagaacatcttcttgaatttttcttatctcttttcatcccttagccatgggtgggtttggcattgattatctctcagcaacgtcatcctctgagagcagttggcatcaggccagcactccgagtggcacctggacaggccatggcccttccatggaggattcctctgctgtcctcatggaaagcctaaaggtgagtagatttcaggaacaagaaccacaagattattacagcaaaggtgtctctgctttcattcacataaatagctagacttctcaggccctcggagttgactgatacatagcacatatataacaaagtcctagaaacatggtctgccttacaagattcttgagtgataatttttaatttctgaattcactagtggtaaagcagtatcttcaggaggacaaaaacaaaggttttagtttcattctaaggttaagaaaattctgattcattttggaatgtttgatttaagccttttctgacaaaataagagtatctaattttagaaatgttttatttgcctgaaaactttatagtaaatgccctgtgtggtaccacatacagctgagtttcagtaaaaagacttgacataaaatgtgatttcacttcttctggtttaaaatagtcttaatggaaactaactagctttaagagtcttataatgactttttctaatagctggatttttatggggagtggggttgggttttggggccatatatatgcctttatatttggctgggattgaaaaatccctttcagacaacttggcatttgacctctgctgacaagatctggactgtttttcagtctatctggtccagttccatgatgcatcctggaccttctgctctggagcagctgttaatgcagcagaagcagaaacagcaacggggacaaggcaccatgaaccctccacactgaggccaaagtggcaacctgggaatgaaggctccataaaccatggcatgttgggtttgcaggactggcccacacagtcccctgcaggtggcagccctcttttctgtttctcgctgtcaagagggtgtaagtattccaccagcccgctgagtgtgcacgaaatgttcgcagtgcaacaaaaagaaaaatccatcaggaactctccgtccccccggggccctccggagggagagagagaggaactgctgtttatctcactcagttacttggtatcaccgcctctcaccttctccatcgtgcatgtccccagccacatgggaagtgaaagctgagaagggaaggcagatgggagaagccaatgggaacttctcagtccttttttcctctttggggaataaaataggaatccattaatgattgctttgctgactgagaatgtagttgaaattattcttaaacatcttttattattattactctcagtagtaaaatatcacactgaattcttccatacacaggtgtgcttctagtcagtgtgtagcaaggaaagccccgttcactgctcctgtgagaggttggtggtgacaggatggggaaccgacctcttcagccagtggaaatgttccataagggagagttcaaggcctgtcagaaggctctggtaggccttcctctggccaggagactccagcagggaatgcccttcactctgtaggtgctcgagccccaatcgaggatacagtgtgggtggtggtgctgggctggactagcaggtagactgctgtaggatttcaaattacgtttttgattcctgtacattttacagtcgcacagcaagcagtctcacagaaggcaggctagtccattcacagcctgacacgttctaataggtagaagctttcagtgtggttattttttctttggttggtttttgtgcccccattctacttcccaccctcctgccccatctccatcccttcttttacccaatgctgtatgctagtaattgtttttattcctaatgtgtgcaacatcacatctccccaagaagcaacagcatggggtccagcagttggggcccaaaagacagtctgaagaggaaggaagcagcagtatctgcgtagcccacagagggcccaggcccctgcccagctgcagtctcccagcctccactttcagagtgaaattcaaggcagcacggacatgtgcccatcaggcacagaagaaaacacgacgtcgtccattttggaagagacgaaagaaaggaaaataaactctttgtatgatatttattaggaggaaagaggactgaaaatgttcttgtgtagaaacagaaggacagcatttctgttagtcatttcctggaaaagtaatattttaaggggaaattatggaaacaatctaattgttcaattgctgtgctagtggtagggtttattttctgggaggtctctcctttgtgtgtctgtatgtttgtgtacacacacgtgcccatctgctgtcccagaggggaggggttgtgtgtgcgagtgtatggagttagtgtggaacttaagagctggaagacagctgtagagcaaagcacatccaggagccccagttgtcactgcagtctgggcaaccccagcaatgaaaaggggtgagataacgctcattgctcttcagagagagtggttggagccccccccgccccgtatgcttacattattgctcttttagtttgacatggtgtttgggttttgtttttttgaaaggtctgaaaaggtgaagccccctacccaatggcaatatgaaaccttttgtgcttctcttcagccccttccctgtgtccacctttctctcctcttcccaagcctttttcctactacctttacccagtttgtgtgtttgagctctgcattcaggcagctgcaacattccagtgtttgaactgtcactgattcttgcgccctagacaagctaaccaggtttaccatctcactcccagtaatacccagctcctatctaaagccccattctgcatgagaatttggtgtttggaatgttttctgactcttggggcgggattcctcgccttatcatcctcactgtggagtaatgagggggaggagaatctttatcagaaactggttttgtgtagtaaactttcttttgtggttttttgttttgttttctgggttttgttttttgtttttgtctgtgcaagacctgcagctgctgaaaatcagctttgcctttaattaaaccatgttctctccaaccaga

SEQ ID NO: 285 - DNA, 25277 bp, Homo sapiens
cttagcttcttccaaaggagaccatctgaccacaattttctactactgcagaagcattgctgtgaagttccctttcccagctgcctccactaatctgcaaaaagcactttctaaagcactggaaaggtagggttgtttggttttttttttctctttccaagaggactttgtaacctggagccttaattcctcataatttggtttacagaaaataacggcctatgcttctcttatttctaaacatatagatttttcataatttgtgtatagtcactgaatttcatccaatcaatatctgattcagtcccagtaaaagagtacacaggctgttaatactgactcatcttgagtgtgttgcagttgaaaaatcagtcaaatacagctcttttgtgtatcaagtatttagcaagccagtgcctccttaaacagttgtagccaatttgctgcttatgattcatggaatttttttctttcatttcagccgagatgaggtgaaaaccaagtggggtgtttctgacttcatcaaggcctttattaaattccacggtcatgtgtacctgagtaagagcttggaaaagttgagccctcttcgagagaaattggaagaacagtttaaggttagatttcagaaatagagaatttttgtcttgtctaaatcaggaagcataacatttggaggaaactgactcccagtttttgtagttacttaactgtgtgaactattggtaaaaattatattcgaagtatgtgaaatctttgcatttatcatcccttcaatttaaactgaggtacagtctgtataaacaaatataatatagcagtgttttcacttgagtagttgccatttgacaaaaattatcaaagtggaaaaaaataaataactcctcagttttgaaactactactacttttgatggtttgtgtattcttagatatgattatgttacctgctttatagatattggcattctccaaaccaagttcattatttttattgtgcttgcattcatcaggattgtggtagtttgaatgaaaggaatgagagtttcatttaacagggatatattttactaatttgaagagataacattaaccttcattctatttatatatgtgaaaatgatcttttattagtatgttaagatattagcagtttaaatgtataatgcataaaataaggagaaagtcaaaagtattaactttttttcagttcatgtattcaaataaatatttgactactcatcggtcattgttttaggcactgtgttaaacagtaaatgacaatttcaaagaacattttatatttcttggttatttctaggtatctatatacttgggtaattgtgtataactgcttcatagtatttctgtaagttctttataagtcaggcattttaagagattgtagaacttggacagttaaggtgtcacttagccaaaaatagtcaatgcgaaatagtttttacaggtaatcgctttttggttgatactttctatgtgcaagatattagaatagataattataaatagcaatagtttgttttgttttaaaatatacttagcctgtgacatatgatgtataaggttgggtgtgtgaaaggaacagctaactttgtcatgtcctaggctgttcagcctggaaaagaacaaacaagtctaaatagttttcatagtaagtattcagacatgtgaaggattatttgaaaagaacatacctgtatctttcctgaagtcaaaactaaaatcttaaattttaagttgaaatctatagggggctgaccgtgggatgttgtggattctccattttggagagcttaacagtcagattgacagccatctttcttggattatttaagtgcagtcctactaaataggggattggactagaaaacttcttgagattgcttccagctctggttctgtgaaatactctctaaattggtggtggtgggtggtccctaccttaatgagatcttcactaactaagttattctagtctaaaaacctagtaagttttgcatttggttcaacctcaaacactaacactctcttcacatatatatttctgtatgtgaagttctggtaagtgtgggtgggcagtttctaaaatatactttgaagtatcattccagcactctaaagttaaacataaaacatagtatgaggcagatctatttgaaagcttacccagtgttgaactagaacattgctggagtgaaattttaacatagtggagtaaaatttccaaagtatttctaaagcatatgtagataattagtatcatcaacatgtatacttcagtgtttctaacaacctttagctactaagcagaaatgtttaccaagttgaggtccactaagggatttaaggcctgggatctgggaattgagatgtaatacattttctgtaagttaaatgtgggctgtttgttaatggtatttatttcagtatatttctcaactgtagttgaaagtttgagtagcaaaaatcttatcagttctaatctgactttattccttggaagactctctacaatataatctaaattttaggaaattacaactgaataacttcaaccttatttctgaatggataggttgttcattcactaagtgtttattaagtacccgctatgtaccatgcacttttctaggcttttagagatataggggaaaacatgacaaagtctggaccttcatgaacttatattatcatttgttagtactagggtgtattcatattcattaatacttctgtgcatacgctagaaaattctttaatgggctgtgaccctcttcagtaggatattgccttctaaaattaatgccagcggatttatagatacaggaaatacattaccatattgtgcttgtaagaaactgctttttgagaaatacaactacatattctcattttatgccagtattatttgaataaacgccagctgatttagaaggttagttgtagaaactgaaggagaaattttgtgggaaaattctagagaagagacaggatttcaggaaattttgaggaaagattaatgcttgatgtctttggaaaagggctaatcattctagacatatacaatgaaatagattgcaagaagactgacagtgtgatagaaagagttcatgtagaatggaattatattctctaatgataatgtaaaagacttccctcttagaatcgtagagcttactatggctatttcaggttctttatgtaaataaaaacaaaaatctcagagtagtctgggcagagacagctgtaagtttctgacatggtaggatctcctgtcactgctggtagaactgtaagtaaggattatctgttttccgccataatgctagtgataatgaatccctgctctctgcaaaaatttcccctgggcatagaggaagactggctatggctaaagtgtaggatgaaactaggaacttctgttagaaaagtatttttgcctgcaggtaatctaaaataattgcagatattaaagtagaagggtaattccattgagacaccaactgagagcatctgggtgattttttatagtgctggttaacagatcactgtgaacacagttattagaaggtaaatgaaatttgatgatcacgcatgtacttctctaagaggggaaaataccagttgataatttgtagaagtacctataatacatcctaatgttgttttagtatgccatttaccctgtgttccagaatatgtacttgctatgccttgtttataaaataagttttaatgtatcaagcctctgaaagagtaaattttatgacaaatctgggaagtcatgctttatgtactgggagttcaaaaaattattttttgagtctgttgctttctagtcatttgtcccaacttaatattttaatatgtatacatcttgtataaaacaatttctaaaggattaagttgtataaatttatggatgaacactcaaagacttttgtcaggtcatatttaaaaatatatagtttcctaggagaaaaaagtttgttgataaacaattcaaacaactctgtggtgtctagattaattcctttcaagacaaaaagtcagtttgggaaataattagacccagtcaaaatactgggattgagggcagaaccatttactcatctgtaattctattacacatggtggttctaaatgcagactaccagtttaatttcttgtgtcaaagatggttcctgttcttgataatatatgcagtacgtctgtcttcttttacagaggctgctattccaaaaagctttcaactctcagcagttagttcatgtcactgtcattaacctgtttcaacttcatcaccttcgtgactttagcaatgaaaccgagcagcacacttatagccaagatgagcagctatgttggacacagttgctggccctctttagtgagtattgaattacttaacatgtgccatcttttttgaaaaacatcatcttaggcatttcatcgatgtagcaaagcacagtgacataaaaaagcatagtgtatttcttacactgaatcaggagttcataataactttcaaccccaagttctatccttttatctgctgataccccctcatcaagttgtaactataacatttttaatatgggaaagaaagcgtctttttagaaagaagctgtaagatactcaagtgttaaacagaatatagtagaaggcacataatattttaatttgaactggcacagtttcatatttcttatgctttttgaatacatttttttttcaagtgtcttttcttggcatcctgtgcaagtgtcctctacagaatgagtctcaggaggagtcctacaatgcctatcctcttccagcagtcaaggtctccatggactggctaagactcagacccagggtctttcaggaggcagtggtggatgaaagacagtagtaagtatttttagaatttcatgttaacttgtgtgctttgtttgtttgatatccataaatatgtaaaaactgccttctaaaatacaacatttgaacaatagaatactgtattttctgccgactctcgggaattgaactgaagacctctttgtacgcttttcatttgtttatttgaattcttcatgtgaggcttagtcttaaggatttgtgactccttgtacactcccttgttcccagttgctgtcctggggaaaaggcatttttcacatttcaaagtgaacttgaagtaaaaccagtttgtttcttatctattacagtattccttaattttttgtttgagttgaagggaagagatttttattccatttttttctgtacatgaactgtttgatgttgccttacagtaacactcaatttgaataatatttgtttatttgaagcataaagattgaaagttattttgattctcaccattttctctgtcatctctactcacagtaattctgacagctcttaggaaccattgattttacaatgacaaatgaaaactttcagtgtacctttgattatagaaataaatacttccaaggtggcttggcaccaaataggaagttcctcccctgcatattttgatggtatatttaaggagaatctctttgaaagttttgctttgtggcccagcatgtatattgaccaaggtcacaacttagaaaatgccttttttaagccacatttaagaccctgtgggccaagcactgtggctcatgcctgtaatcccagcacttggggaggctgaggcaggcggatcacttgaggtcaggagtttgagaccagcctggccaacatggtgaaaccccatctcttttactaaaaatacaaaagatattagccaggcattgtggcatatgcctgtaatcccaccacttcgggaggctgagacaggaaaatcgcttgaacccaggaagcagaggttgcggtgagctgagatcgcgccattgtactccagcctgtctcaaaaaaaaaaaaagaaagaccttatggtctgtctgcttcataattgtcttttctctcatgtagttataagctctttccatgatatattgacattatcatgaatagagtttaggaacatagcacagcatactatatacatctccttttaatgttagcattggttttagtaatacggattttcagacattgcttccttgcataaaatttttatttcttaactcaggctatacagtttttctactcttgtgtactctagaactcaaatttatgtttaattcaatatattatatcagtaatgttacaaaagaagaactgcatgttttaccatttgcttatagagtttttatatttatgggtaggaattgttattttcattgtgttttgttttttcttattgttgttcttgtacagtgatccttttggcccattctgtgtgttcccatttcttctcatggcaaaagatgttgaaccagaaggaacagctttattggcaaacattttttccctccatttttttctgtcatttactctttccacttcctcctatcagatttaccaaaatctttagaattatgcccttgtaggtgtttgattctgtgttaaattatgttagtactcattttaaagactagcatgggatatcactttaaaactgaagatttttccttgtgtgtctaatacactaaagttataatgttcatttatatcttttaagtaatggaaaaacaatgactgtttcttttgtgaactcagaattttatgtatattcaaataatcttcagtttcttatatctgggccttctcaatttctagaatttactttcccttgtacttttttgagaacatactctcttaagctaatgaatacatggaatagtgattttcctttgtagaaaatagttatagggtaaagcagtatatcattaggtaatccactcatgcgctttttctacagtgttttctcgagagcttatgtgtgttgcatgaagacattgtacagtatagtattctcttttagtttactgacctttttttccaactatctcttgtaatctgttacatctccaaaggtttgtagcagacgtttattcttcaatatttgtttatatatttttaatatgtgtatatatttgttgatatttttaaagtagcatattcccatatttcagagtgtacaactgtcccaaatagttaacttacaattttccgtagtgtgattatttacgtccagtttctctatcctgggcacttcacctcatgcttttctttttctttctttcttttttaataaaaattggttgatacatattcagaggtaagcttcatattaaggagaatgtgattagacagatgagtctactgtaggaaaatcaaagtaattgtttccaggccaaaaccaattattttaagctaattactttaaccaaataattttaagcaacatggctacttccacccatcacatctattcctcaccccagcaaatgaacactcaaactacttggatttgtctcacttcaaaaatcttgccctgtcatatataatacatcagatttataaattgctcttatgtttgaaagataacagagattttgatacaaatgtttatatgtaaagtgatatttataaatctgtatccataatggaaactttaacatacctcactcaggaaccaaggacacagttaacaaatacatatatagtacgtacttctgaatagtggaaagaatatgttctaatatttcatgtgtaagctttcacaaaaattgtgtattaagaaacagagtttagagttaaggcttttgtaaaaatgtggactttttgtaccataaaaaaagaggcattatcactttgaacagggaatgtgatttgtgtggtataaccataccctgtcacagattaaagaactaacagcggcttccacaactcataatgtatgtgaaagctctataaaaacatagtatgttatttctttgctcagaattttctcagcctatttcagttttccatgtttaaaactgacaaattattttcaccatttgttgaattaggagcatgggaaatgatctacagtggtagtaggtctctgtcatggaaatttgtcccttttgttgtatctttatcattatctagtgtatctttgaaagtacatttttaaaaattatacagcctttgaaatgctgaaataagggaaaaatacataaagtccaggacctatagataccattttcatggcttattagtgttctggtttctcttacataaaaataaagtctgaactctttctttaatttacagcatttggccctggttgatttctcttctgaatagtttccatccccatgaagaggacctctcaagtattagtggtaagggctaccctaaccttgtgttgttgatgtggttctccatcattaatggtggcttaatgccagagaaaaagaggtttttggtgatgaatgattgattttaaattcagtatctcagaagtgactgtgaactctacataagtgggtgggtggaagtagataatgttctcccagttcttctggcagcttattctcatttagcatcattcaaataggagttcagagagtgtaataccttcagattctttcattccttcctcctcattcttactattttaaaaaaagcaattaacatgaacattgctctgtcaaagtaatacttactcatcgtagaaaatttggtacaaagaaaaagaacacaaatctcccatacagagataccttttactagtcacgatagtatatcttcttcgggcctttttcttacgtgtgtacacacacacaggaaatgattcatatcaaataaagttttgtgcctgattttgaaatttagtattatattgttagcattttcttttgtcattaagcattttgaaaacatgacttttactggcttcataatattccatcctatggaagtgctataatctatttacgcactttctgttgctttaaaattttccccattataaataaataatgctgcactgaacaacctctggcttggcttctttctgactttttttttcctcttaaatccatgctcctcaggcattaatttgcacataaatcacctgaatctttttaaaatacagtttatgattcagtaggtttgaattagtgcccaagattctgcatttcttacaagctctcagatgatgtcaatgttattcaatactttcagtaaaaagagacaggtaatctaaacattgggcttactggatccaagactatgaatttttaagactgctgattttttaaaaagccattctcctcagcattgagtattaggtgagtgttaggggaatgtctgtgtcccaaagataacatgcagagttttgacaggtgagttattttcatcaggatcatgataaagaagagcagagaacaataagcattataatttctttctgtatgttaatttttaaaaaaatttagtgaacagtattccaccaaacaacattttaattaaaatgtttgcaaattttgattttgaccctttagcgacaccacttccagaggagtttgaattacaaggatttttggcattgagaccttctttcaggtaggtgatagctgaagtacctttatcattgccagtgattgcagtattaaaattagcagagaattgggcttggatgtagaggaacctttgatctgtcccagctgtgtgttatttttgtaacgtcaactaatactgaaagttgttgtgaattggatttgtgtatgtcacgccttcaattcctgtgtaataaaaattaaaatgtaacctttccatctgtgcccttgatcccatcccttctcacctccctaagaaccttgctccatctgttatcctctctgcattgtatttccagtgtcttgtctttctttcctttcttttttaaacaactaattatctttagcctagtaacatttaagtgtgccccattcttttaaaaaggtaaaatgaatttacatccctctattttcctacgttgccttatcttttcatcatcaaacttcttaaaaagagtagtatgcactttgggaggcggaggcaggtgaatcatgaggtcaggagatcgagaccatcctggctaacccggtgaaaccccgtctctactaaaaatacaaaaaaaaaaattagccgggcatggtggcgggtgcctatagtcccagctacccaggaagctgaggcaggagaatcgcttgaacccaggaggcagaggctgcagtgagctgagagatcacgccactgcactccagcctgggtgacagagtgagactccgtctcaaaaaaaaaagagtagcgtgggccaacctgactgactccacttcaactcctgatcattttcagcctactgtggtttaaactatcagtgccttctagataccaaaatccagtgactatagtctttatcctattgaattttcttcagcattgagtccgtcgatttccttccttcatgaaacctttttccttagctctgtgatgcaatttttcccacccttagcactcagtctttttcactatttcttttaaactacatgcctctgaatgttgttgttttccaggattcttttcttgccctttccttctcactttgtacattcaccctgttaatcaaatccatccctatgtctcttgaatggtatgtcccaaattttcagctttgacttctcttgaagtttggatgcatattctaacaatctgacctcccttacgcattttaaactttaacgtgaccaaaaactgagcttatattttccgatttggtcagccaaaaagcaatcttctttctctattttctgtctgtgcctgtggcattacccatctatatgaccaagctagaaatctgaaaaacccttgtttctatttgtctttctcaccaagcctttataattatgtgtctgaaatgcttcttaggttcaagtccttccgtttatttccctatacatagttcaggcttttctcaccagtttacctgaagtataaaaaccttcctacgtatagttcttctcctcctatagtctgtttctacactgcctatagtttttaagtatggaaatagtgatgttgcatgactaatatttttatttacccattcccagttgctccactgtctcttttagcttgatgctcaagttccagcactatccagctcctagttgttcagccttattttcttccatttcccccagtatttataaactctatacactatgtgctatacttgaatagctcactatttttattcctccacacctttgttcatgttgtgcctagaacatttccttctcctctactgcccttccatcaccagcctggtaagcacttagccatacctgtcaaggtccagctcaggtatcactctatgaaacctttcagagcttctcagaaggaactcatcctccttttactatattcacttaattctttacatagttcttattatgcttatcagattgaatcataattatttattcccaaaggtagggactcttatttatctttgtgtcctcagcatctagccttctgcctggcaattcttaaatcttcttaaaaaaaaaaaaagtttaataaggagaaatctgaaaaatctttattttttcaggttggtttacccttctgatatcaatgagttattctatatgctttacgatatttatacatttttctgatttagaatggtccaccacaaagtggatagattaatattatttattaaaataggcacctcagagactcttagcattgccatggtcatttcaagcaaattacttggcatgcaagataaatgtttataaaactttattcttaaaatgataaaagaatctttcctaataaaaagttgtggtttatttgagctccctgactagaaagtgaaatgtgagtaaaaatattacattaatgtaatgaatttgtatattttcttttctgctttgtttcatagtttgtaaaaatctctggtagtataaattctaataaatgcagttgattacatcaagtagctaacctatgtgggaagtaatctgaagccattacagttaatcaggtgaacttggttgcctggaaaatatctttagcaatttaatattctcataacttgcttgtgtcaattttaggaacttggatttttccaaaggtcaccagggtattacaggggacaaagaaggccagcaacgacgaatacgacagcaacgcttgatctctataggcaaatggattgctgataatcagccaaggtaagtctggaacttctggtctacccctttttaaccacctttttagataaacacatgcgcgcacacgcgcgcgcacacacacacatctcatatgttacgtattttaggctttggtataaatattgtcaatcatgaactcttaaatcgacatgttggtagcacaacatctaattataaccctagtgagtaagtatactctttatttagaatctctgttctccctattgtgtattacagaggtctttcttgtttatcgtgagtttctgctctaatttataaatatctctgtaaatctaactgaactgtactttcacagtcatggtaatttgtattggcctgggcatggtagtcagtttcaggcaggacagaccaagatcgtgctagtagccagttaagtacaaagcagatgtggtcgttagtgtagggaaaagaacgcaggttttgtaattccattggtttgagttccgtttcgagttccgcagcttctcaagtgggtgtccttgggatctccccagtagattataacctttccaaagtcactaactacttcctcatttttgtattcaggtttctgtcatacagtaggtagttaaatgcttccatgtttgaatgaacttaccacctccaagcttcaattttcacatctatagaataggaattatatatagctaccttataggacatatcaagggccctagaccagtgtcttgcacttgaagcatgctcagaaaatgtaaattctagcaaacgttgaaagagccagagggataggttgtgacgatgttaagtgtgataatgagaacctcagtttctacataactactttttgtgttacctgaatccacattgttatatcctgctgttttcatggttattagtgctaggaatatattgacttggatccacacacaattcagttgttattttttaagttaatgttttttatatatggatttatttttgcttttttaggctgattcagtgtgaaaatgaggtagggaaattgttgtttatcacagaaatcccagaattaatactggaagaccccagtgaagccaaagagaacctcattctgcaagaaacatctgtgatagagtcgctggctgcagatgggagcccagggctaaaatcagtgctatctacaagccgaaatttaagcaacaactgtgacacaggagagaagccagtggttaccttcaaagaaaacattaagacacgagaagtgaacagagaccaaggaagaagttttcctcccaaagaggtgagaagggactatagcaaaggaataactgtaactaagaatgatggaaagaaggacaacaacaagaggaaaactgaaaccaagaaatgcaccttagaaaagttacaggaaacaggaaagcagaatgtggcagtgcaggtaagctgtatttgaactataaagcaggtagaggaaggctcacacaaaaggcaagatttttcattttgttctaaagccatgagaattggccgtcctggaagtttaaatgcattatttaattgcatagtaaggttatataaagagctgtgatagatggttactttttcaattcttgggaattgtgagtgaaaaaaaaatctcagcctgatttgacactttcgtcagtcttcaccaatttaagcagtttgaaaggattagttgcagagttgtcagtttcacacaggattatattttatttagaagatataactaccatttgtcaatgctatagtggagatttggggtcttctgtagatccagtagaaccaagagtatattaaggcttatgcagtttttttttttagattcactataatatatatatatgtgtgtgtgtgtgtgtgtgtgtgtgtgtgtgtgtgtgtgtgtattttttttcttggaaaaatatgagacttttttattgacaattatacttgtcccggctattggtattaatatcactttaatcttatcctggatcctgggaatttataaaggaagaacccaggtttcttgctgggaaaagataagcactgctcagttatttgtgactttctttttattaatatattttcccaaatagaaaagatggtttcatgtaaacagaaaagggcctttattctgtgatggttttattaatactattaatgtttgaataaatacttaagcagccatgtgagttgttaacacattttagcaaatgtatgtgtttgcatgagaaactttacattgttgaaggctgcttacaaataaatagtacctttgaagtatttctctaatttttttgagaaagagaaataagaaaataatagttccattttaacattatagcaaggagagaaacagaaagacaaggtagaaattaagacataggggagagagagagatgctagggaaaggcaagaaaaaaaaaaatgaactagaaagccaaaggatccgagttttagagataatgagtccagcattttctgtttacctttcctccattctctgtaactgctcacaataaggtccagactgaaaatacaatctccttttttggtttctcatccatctcaaatcacctataaatgattaaagaaagaaagagtaaacatatcaccacactctgtacctcgtcctgggttttctataaatgctactcatgttccctcattttgctcaactttgagcagtgcatatgacatctactctctggctccatctataggatctcagggcctgttccttactgctgaaagtatccttatttattctgaagggtggtaaagttgcagggtggaaggtggatgcctgactgcacatatggctacccagatgaaatcaaactgagggccaaaataactcacctatgggttaatagtcattattagttcataattcatgtatgtcgtttaatgaattagagtatagagaaccctgggccccagaacaagcaacttaaagtcatagacaagtttttttcaacttgttagcatcaggcatctcatttgtaaaacaaatgggctctaaggtcctttacatttttggatttttgtgatcatgggaaagcaaaataattagtaaaactaagatagtaaaattatcttttattggctattaaataatttgctttgattttccatttttaacttaggtgaatttaaatatcttcagcatgtactttttgatctaatgaggttttaaatactttcttaggagtagggtcttctttctagcacatttgagtttcaatttattatagatagttttgcttctattggttacaggtaaaatcccagacagaactaagaaagactccagtgtctgaagccagaaaaacacctgtaactcaaaccccaactcaagcaagtaactcccagttcatccccattcatcaccctggagccttccctcctcttcccagcaggccaggtaaatatgttttgtaatttcttctacttaatcttttctgtgcaagaatttctattcagtcactgagaaatgtgttttctgttggagtaatgttactaagccataaaaagttctattttccctaatacttataaaattatttttgaactgtttgtgtgtagtgtacatacaagtgcatgtttgttattatgaaggaaatcctatcactaaatacagaagctactcacagaacactgattacttcagtggatagaggaaaaatatcaagtctatttttagttcttcaaatcaagttaaagattgacaacatgactaatctcttttgtgatgtgttagaagactccctctacctacctgttaaaaaaaaaatgactttttttgcaattttttgctgtttccttaaaactaaagctgtgttcttctgttttgaagggtttccgcccccaacatatgttatccccccgcctgtggcattttctatgggctcaggttacaccttcccagctggtgtttctgtcccaggaacctttcttcagcctacagctcactctccagcaggaaaccaggtgcaagctgggaaacagtcccacattccttacagccagcaacggccctctggaccagggccaatgaaccagggacctcaacaatcacagccaccttcccagcaaccccttacatctttaccagctcagccaacagcacagtctacaagccagctgcaggttcaagctctaactcagcaacaacaatcccctacaaaagctgtgccggctttggggaaaagcccgcctcaccactctggattccagcaggtaagttacagttgtgtgtactatccagctgaatgaaataaggggaaatgctgaaagattcaatgttagaaatgctcattaaactttgacatacttcttgcttagatttatagtgattatgggaaaacaaaagtattgtctctactgtttatgaaagttcaaatgttttccttactcttgtaaaggataaaatactagatcttaagtaccattcttggctgctactaagtgtccattttattgaaaatggattttctgcaaataattctcctataggaacataaactactagggaaatagaatcacagtcttgatgaggtgctaagacagatgtgacaccaatcttaaatgttgtcgttggaagcacagcacttgaagcagaaaggggaaacaaacactcttatgcaaatatattcattcattcattaaacctcttaaatagttgaattaaaagaaaatatgagtgtggtgcccataatctgtttccaaaaagctctgagtattgaatagcccaaaaggtaaaggaaactgctgccttgcctagagttttgttggttggaaaacaccccaagttcattctgtgattctttagcattcattataagtaatattgcattttatcctcacctttatgacaggcgtctcttttttagtatcaacaggcagatgcctccaaacagctgtggaatccccctcaggttcaaggcccattagggaaaattatgcctgtgaaacagccctactaccttcagacccaagaccccataaaactgtttgagccgtcattgcaacctcctgtaatgcagcagcagcctctagaaaaaaaaatgaagccttttcccatggagccatataaccataatccctcagaagtcaaggtcccagaattctactgggattcttcctacagcatggctgataacagatctgtaatggcacagcaagcaaacatagaccgcaggggcaaacggtcaccaggagtcttccgtccagagcaggatcctgtacccagaatgccgtttgaggtgtgtgttctttcctatcaccaggcaatttggagataggtctgaggttgactgtcttttgaatatctcaaatagatcttataaaaaggccactcttattcgttagtactatagaatgccactgagtattggtgtagctcttggtttcctcctcagagttgcacagtatgttttagtttggaagctgaagaattccgtaactgattttgaactctgatggtctggcaaagaaaccatgtacagaaatctctaaaacagcatgttagagaattctgagacaaagcactcctctcagttgggctgaatcatctaagtttaaaaataggtttactgatatttaaataaattgctctctgagaggaacaaggttagccagttatcttggacagtggaggtccctttctttgccctttttattcatgagaaacaggtgaatgttagtaactttttaaaagatctgtttctctgttagcacaagatatgctaatcattttgctccatagcattgttttactcactagccacattaaccttttgtgttctgctctgtcagtatttttgcttttctattgtcttgaactttctccattattgtccttgtgtcgctttgcctttgcatttcagagcgttttttctctttgcctaataccatctatctcactatccccttgactttagttgtcttcttccacctaattatgctactattcctttatgcttttgttatcccttattgcttctcactgtgatgctttctgtcactaggaccccaagagctcccctctgcttcctccggacctgttaaagagtctggctgccttggaggaagaggaagagctgattttttctaaccctcctgatctttacccggctctgctggggcctctcgcctctcttcctggacgaagcctttttgtatgtatttgacataattctgcttcttggtctaacccccagctgcttctctgagatactgtagtacacagattaggtgatttcttctcttcctggggctgtccttttcagaactgtaaaacatattttctaattgcctaaaccaaccttaagttggtagtaggatatagcaaaacatttctgcctttatagttctcccaaatcatggagacataccttggttttatgtgttatccagaaagcattctgcagagctggtcacacacacgatgtgatggtgacaaattaactcactttgcaggtgacacttccatctggacccagaaattttaagtatcatttaatcttgcttaggaacagtgagatttatttctcatatgtagccaaaatatgaaaggaaatatgttcttgattttttttttgactgacattactgaacagtatatggctcttttttgtttggttaactaaatgcagaaagagccctgatctaaattcaaagttggattcataaacagaatgagtaaaaatgaagaggattctatttataaacattgtcagagtgtcataaatgagtaaatatgaaaataactagaatcacataaaataaaatctgagaactcagcctgcatttcaaagaacatcattctatatgcttgtcagtgttcatattatattttactgtgggtggggagtataaaagatggaaagaaagatgtatgctatgaggctttttcccctctctttattacaccttaataaaacataaaaagatagtaaattttactttcttgctgtttctttctcataaacacagggcaagaacacattcgtaaaattaaagtacattaattttagtgtcaagagaaataaaaccttaacagctttcatgacattgctgccatccctggcacttgaagttcccttaagaatttgcctgggtagtagcagtaggggccccataccaagttattaaataatagcaataaaagatccccctggagacttaaatggtagcagtgccatggctgagcgcacagggattgtggaagctcagctgctatactgttgcctctctatgtttgcctttcttgtggcttttatgctagagtggctttaaggactgagggtagtgcttctctgtccacttgtttcctaatcccttagttcctgttcctgttcccttagtgtccctttcattggaaatggagctgatggtagaacaagtgggagtattttcagggtttttttttcatgtttaaaagacaacaatgaataaaaaaaacttcgactataacccttccaatatttaacattaatgatacaacgtatgtcaaagtgcttctcttgtcgtaggtatttagtaatgttttattagccagctattcagtgacagcattagagattcagctttgtttctcctaataactttgctagggccaataaatgtaagcttgacttttagcaactgttttactatatactgcaaatagagctgcttaaaaagcatattaacaaagccatttgtcaaatggatttgaaaggctttttaaaagtcaccaatgttaatgttttaaaaattgtggggtggagagaaacagtgttggaacagttcagcattttgttttgagattaagtgcaactattgacaaggggattcctgaggtccatgcctcataaacactcagagtgctgtttaccagggtctctggtccctgccagaatataatctctgactaggtttgatctaaaaggaggattctatgcacctgtggcaactggcacttaggcggtgtcttggtgttaacagatttgaattcacatcttctgagcctcaaattgtactcagtgggcgaatacaggcatgcttttgctttggttccatagtatggtaagattaatattaagaaaatagaaggtataacttaattacctttttttctgggactgtgaagaaatccttattggagaagccctcagagctcatgtcacattcatcctctttcctgtccctcaccggattctctctcaatcaggtaggtgaacaatgaagaatcctgctgtgtgcttttagtgtagactgatcattgtctttctcatactgtttcagtatgtctgttttttctttattttccatgtattagtgtattccagatatttgattttatcccccttgtctctgattggggcatactagtgacttgtacatcatgaattaaaaccctttaacttctcattaatattgaaacccttagggctctctttttgagccaaataaattattcacattttcaacctggatagtttacacagagcaaatttaagggtgagagaaagcaaagaggaaaattaatttgactggaaaattgaaacaaaaagaaataaaagccttcaaaatttctcttcctaagaaaagcttaaggtgtaccaagcatccatgaacaagacattggattttctcaaatctctttccttggggtgagtttataacttcactgtcatgtctttcaggaaagatacccaaataatagtatgttcaatgaggtatatgggaaaaacctgacatccagctccaaagcagaactcagtccctcaatggccccccaggaaacatctctgtattccctttttgaagggactccgtggtctccatcacttcctgccagttcaggtattaactactctttaaattatagaccttacatttcctgtacactcagattgattaagggatagtgagattctgtaattacaaatatatcatttgttgggttatttttattttttgtttgtttgtttttgtaacttctgaaaggaaatagaaaaaaaaaaagaagaagccggtttatgtaataaatgctactgacaaaactttttacatcctcagtagccagcagagatgtaagggagaaaatagaggttctatcttatggttctcagctgctttttagttttatttgtaggtgttcattctttgcagaaaaattgcacttttttttttgagacagtgtcttgtggtgttgcccactctagactcaaactcctgggctcaagcagtccttccatctcagcctcccaagtagctgggactacaggtgcacaccactgtgcccagctctgcactttttaaaattgagatttttaacttagagtctgacttaatagtaattcttaaggttagcaaattctttctgatacataagaccaataaacatgtatctgaaatagccgtgtgagaatagggcattcattcagttgacaaaaattgcctactattttattttgcttttttaaggcgaagaatatgccttagatatgtgtggcagggcaaattagtgcatctagcagatctctttggagcctttagtttccctttccttcaaagccctgtggttattgttagtagaattttagtgatcagatctacaggaacctgtagttctttgtatgtttgtgaaacaatgatttactatatcctgtgttgctattatttaatagatcattcaacaccagccagccagtctcctcattcctctaacccaagcagcctacccagctctcctccaacacacaaccataattctgttccattctccaattttggacccattgggactccagataacagggatagaaggactgcagatcggtggaaaactgataagccaggtgagatctacatttcattgccaggcaaaattgaaagaatttactctatccttccctggggtctggcaattggcagtgatagaacatcttcttgaatttttcttatctcttttcatcccttagccatgggtgggtttggcattgattatctctcagcaacgtcatcctctgagagcagttggcatcaggccagcactccgagtggcacctggacaggccatggcccttccatggaggattcctctgctgtcctcatggaaagcctaaaggtgagtagatttcaggaacaagaaccacaagattattacagcaaaggtgtctctgctttcattcacataaatagctagacttctcaggccctcggagttgactgatacatagcacatatataacaaagtcctagaaacatggtctgccttacaagattcttgagtgataatttttaatttctgaattcactagtggtaaagcagtatcttcaggaggacaaaaacaaaggttttagtttcattctaaggttaagaaaattctgattcattttggaatgtttgatttaagccttttctgacaaaataagagtatctaattttagaaatgttttatttgcctgaaaactttatagtaaatgccctgtgtggtaccacatacagctgagtttcagtaaaaagacttgacataaaatgtgatttcacttcttctggtttaaaatagtcttaatggaaactaactagctttaagagtcttataatgactttttctaatagctggatttttatggggagtggggttgggttttggggccatatatatgcctttatatttggctgggattgaaaaatccctttcagacaacttggcatttgacctctgctgacaagatctggactgtttttcagtctatctggtccagttccatgatgcatcctggaccttctgctctggagcagctgttaatgcagcagaagcagaaacagcaacggggacaaggcaccatgaaccctccacactgaggccaaagtggcaacctgggaatgaaggctccataaaccatggcatgttgggtttgcaggactggcccacacagtcccctgcaggtggcagccctcttttctgtttctcgctgtcaagagggtgtaagtattccaccagcccgctgagtgtgcacgaaatgttcgcagtgcaacaaaaagaaaaatccatcaggaactctccgtccccccggggccctccggagggagagagagaggaactgctgtttatctcactcagttacttggtatcaccgcctctcaccttctccatcgtgcatgtccccagccacatgggaagtgaaagctgagaagggaaggcagatgggagaagccaatgggaacttctcagtccttttttcctctttggggaataaaataggaatccattaatgattgctttgctgactgagaatgtagttgaaattattcttaaacatcttttattattattactctcagtagtaaaatatcacactgaattcttccatacacaggtgtgcttctagtcagtgtgtagcaaggaaagccccgttcactgctcctgtgagaggttggtggtgacaggatggggaaccgacctcttcagccagtggaaatgttccataagggagagttcaaggcctgtcagaaggctctggtaggccttcctctggccaggagactccagcagggaatgcccttcactctgtaggtgctcgagccccaatcgaggatacagtgtgggtggtggtgctgggctggactagcaggtagactgctgtaggatttcaaattacgtttttgattcctgtacattttacagtcgcacagcaagcagtctcacagaaggcaggctagtccattcacagcctgacacgttctaataggtagaagctttcagtgtggttattttttctttggttggtttttgtgcccccattctacttcccaccctcctgccccatctccatcccttcttttacccaatgctgtatgctagtaattgtttttattcctaatgtgtgcaacatcacatctccccaagaagcaacagcatggggtccagcagttggggcccaaaagacagtctgaagaggaaggaagcagcagtatctgcgtagcccacagagggcccaggcccctgcccagctgcagtctcccagcctccactttcagagtgaaattcaaggcagcacggacatgtgcccatcaggcacagaagaaaacacgacgtcgtccattttggaagagacgaaagaaaggaaaataaactctttgtatgatatttattaggaggaaagaggactgaaaatgttcttgtgtagaaacagaaggacagcatttctgttagtcatttcctggaaaagtaatattttaaggggaaattatggaaacaatctaattgttcaattgctgtgctagtggtagggtttattttctgggaggtctctcctttgtgtgtctgtatgtttgtgtacacacacgtgcccatctgctgtcccagaggggaggggttgtgtgtgcgagtgtatggagttagtgtggaacttaagagctggaagacagctgtagagcaaagcacatccaggagccccagttgtcactgcagtctgggcaaccccagcaatgaaaaggggtgagataacgctcattgctcttcagagagagtggttggagccccccccgccccgtatgcttacattattgctcttttagtttgacatggtgtttgggttttgtttttttgaaaggtctgaaaaggtgaagccccctacccaatggcaatatgaaaccttttgtgcttctcttcagccccttccctgtgtccacctttctctcctcttcccaagcctttttcctactacctttacccagtttgtgtgtttgagctctgcattcaggcagctgcaacattccagtgtttgaactgtcactgattcttgcgccctagacaagctaaccaggtttaccatctcactcccagtaatacccagctcctatctaaagccccattctgcatgagaatttggtgtttggaatgttttctgactcttggggcgggattcctcgccttatcatcctcactgtggagtaatgagggggaggagaatctttatcagaaactggttttgtgtagtaaactttcttttgtggttttttgttttgttttctgggttttgttttttgtttttgtctgtgcaagacctgcagctgctgaaaatcagctttgcctttaattaaaccatgttctctccaaccaga

SEQ ID NO: 286 - DNA, 567 bp, Homo sapiens
aatagtttagttagttacagaatccttcacccaagttaatcctgaaaaattggacaattgggttagccaaatccatagcattctgttatgtatattagtatagcatagtatatgcagtcatttaccatataacaatgttttggtcaacaatggactgcatatacaatgatgctcccataagattataatacatttttgctgaccttctctatgtttgtttacactgatgatacttacttaccattgtggtatagttgcctgcagaattcaacatagtaacatgctgtacaggtttgtagcctaggagtagtaggctatacctggtaacctagctgtgtagtaggctataccatctagtcttgtgtaagtgcactctagatgagtttgcacaacacgtttctcagatcatgtctccattgtgaagcagtgcataactgtattacgaagtgtcagctaacaagatactacttacgaactagcttcatgaacaccgctgcttttcatcacttaaatgttggcgattgatatatattcagtattgagttcttaacacatgttcctctctga

SEQ ID NO: 287 - DNA, 567 bp, Homo sapiens; identical to SEQ ID NO: 286

SEQ ID NO: 288 - DNA, 1865 bp, Homo sapiens
gatttgaatgtgagaagagtagccttggtcacatttaattcagcagcacataacaagccatcattaataagggatctattggatactgttcttccacatctttacaatgaaacaaaagttagaaaggagcttataagagaggtaagttagatcacactgtttatttgagcttgtctttgacttaagtattgtatatccacacgttcttttttgctttaacaggtagaaatgggtccatttaaacatacggttgatgatggtctggatattagaaaggcagcatttgagtgtatgtacacacttctagacagttgtcttgatagacttgatatctttgaatttctaaatcatgttgaagatggtttgaaggaccattatgatattaaggtaagatgtttgtgcctatttatacaatgttttagaagaagactttgctagagcaactttcacccttgtaatttactcatgtgtctgagaaaaatcaggttgtctgtgaagattttgataagcatattgtaaactataaagtgcaaaagtaataggcagtgtaacaccagttgacgtgtaagaaagatccagagccctttttattggaggaggaagtggcagtggatgcaaaatgctgtgtgcccacttgcttagtgaatagtccctagatcctttccctcaaaaaagtcccgacagattttgctgtttaaagtataaatctgtaactttttggcctgtcttaacattggaccatagttgctacccatggagggttttcttagcattgtcttgattaagtctcctgagctacctttggggctagtctgaattgtaactgtatcatttacctgaatgaggaatttttgtttttcaatataatatactgtgtttaatatcaagaattttgttataggacatggaacttttcagatatacaaaacaatctgtagaagctacttgagagaaatcatactgcgtcttatgtttggataatgaattttgcatataagtgttctttgttttcctgtgtgttcgtctccatttaaaatgtgaacagtaaaagggtgatttgaaaaatgaaaaatatatgcattgtgtctttttcatctactcttccatttagggcttttggccaagcaggacaaaagtggtaactcagcagtaattgagccatactacccgaactcctactcttaggtttccatgtgtggtagtgacctgagcctctcaaagttcaatgaagagggcctccccaccaagaagtaaaaggatgtgcttgtttaattctatgagtttatagtccaagagaaaaaggtttatggggtttatgggttatcaggttttacatggattaatctgaataactggtcaactctgttatgatagtggaaacttattatgaaattgtgttccagttcagtaattttctagttctatgattctcaattctggtgcacatgagctttaaaaaataaaaataaaaaaaataatgtgtgccatattctgacaggttcagtaaaactctctggggatggggcttgaagaatgggtatgtttctaaagctctctggatgattctaatgtgcaaccaagattgaaaaccacttttctagttcttatatctgtctgattctgattggcagattacattaaaaggaaggtttactttgcatgctagttattttcctttaaaggatttgtcagaatttagtattttgtttttagaaaatgatgtcaaatctaaattctgtcttttttattcctaatagatgctgacatttttaatgttggtgagactgtctaccctttgtccaagtgcagtactgcagaggttggaccgacttgttgagccattacgtgcaacatgtacaactaag

SEQ ID NO: 289 - DNA, 4544 bp, Homo sapiens
gcatataagtgttctttgttttcctgtgtgttcgtctccatttaaaatgtgaacagtaaaagggtgatttgaaaaatgaaaaatatatgcattgtgtctttttcatctactcttccatttagggcttttggccaagcaggacaaaagtggtaactcagcagtaattgagccatactacccgaactcctactcttaggtttccatgtgtggtagtgacctgagcctctcaaagttcaatgaagagggcctccccaccaagaagtaaaaggatgtgcttgtttaattctatgagtttatagtccaagagaaaaaggtttatggggtttatgggttatcaggttttacatggattaatctgaataactggtcaactctgttatgatagtggaaacttattatgaaattgtgttccagttcagtaattttctagttctatgattctcaattctggtgcacatgagctttaaaaaataaaaataaaaaaaataatgtgtgccatattctgacaggttcagtaaaactctctggggatggggcttgaagaatgggtatgtttctaaagctctctggatgattctaatgtgcaaccaagattgaaaaccacttttctagttcttatatctgtctgattctgattggcagattacattaaaaggaaggtttactttgcatgctagttattttcctttaaaggatttgtcagaatttagtattttgtttttagaaaatgatgtcaaatctaaattctgtcttttttattcctaatagatgctgacatttttaatgttggtgagactgtctaccctttgtccaagtgcagtactgcagaggttggaccgacttgttgagccattacgtgcaacatgtacaactaaggtaagaaatgataagtatcaacctaggtcagacttggtgtattggggattcctagccaattcttttctctagctttccaaatataactattccagtgctctgtgtagcagttggtttaaaaagttaacctatcgaatactgatattttataaaacttagcactgttaacggctattcttaaaagtttttgtttattgctatatcaatatgttaacattttgaagtactgatacatatttgaagtactgatatgggataaaatgtgatcaggccacaaaagaggaaatttttaattctggttggaaggggagtcagaaggtttcatattagggtgacaacatttgcaatgaacctcgaaaaatcaagattttttttttttagaccaagaagatgaaacgggctttgaataaaggcctggagatgtcatcatatggtgtgtttgaaaaagtgaataatagagtatagcaaagaatagggtagctagaggagtactttcttgatgggggctaaagtgtgagacttgctaagcagatagttgaaacaaagagtgtcctactctctttgttacaatcatttgggtctagattttctgtttttataatggggctttgtgtaaaatattcccttaaaagaaaaggagacagctactttaaaaataagtttaaaaacagttgttcttagaatgtaatatgccttatggacctacgagagtagcttttagcaggaagatcttatgtgcttaaattttgttcatgtaagagctgtcttttatagcatgtaatctaagtttactccatcttacaggtaaaggcaaactcagtaaagcagggagtttgaaaaacaagatgaattaaagcgatctgccatgagagcagtagcagcactgctaaccattccagaagcagagaagagtccactgatgagtgaattccagtcacagatcagttctaaccctgagctggcggctatctttgaaagtatccagaaagattcatcatctactaacttggaatcaatggacactagttagatgtttgttcaccatggggaccattacatatgaccatacaatgcactgaattgacaggttaatcataagacatggaaagagaagtgtctaaaagcttcaaaatgttccacttttttttccttcatggagactgtttgtttggctttcttccattgttgtttttgtagcatttatttcagaaatgtgtatttccataatccagaggttgtaaaaccactagtgttttagtggttacagcaacatttgaaatggaaactaaaagttaggattttatggagtatggagatagggttcagtatctatttaccctgtaatgtttaggattacaatgttaaaattttgtgaccatgaatttctttcttttataaattttctcatttaaaaatcaaaatcttgcaaaacaaaaaccatgtttctttttcttgtataactttttgttttcagcaacataaattgatttttagctggcagacaagaatatccatataagatttgttaaccatttcagagagtttggcaatttttaaaagataataaggtatcatttttaagtatgaaaattaacaatatccctgttgcgcacactaattttgcatgagtaagtttacaaatatgtatcgtctgtaaagcagcatgtgcagattattcataatatagaagttaaaataagtattagtgcaattttcagatatttatttttgcacagaaaacacattatctggagagaaagaaaggagaatttttgagacttgggttttcttaatgccagtgtgaatttgcagatgttttcagaaaatcaagtcacagtaacaatttgccacttttttctattataaatcttcttacttaaattttgaatatttagtttttctcagttacccatttgtgtgtgtgtgattccacttagaaattcttaaaaccagatttttctttcattccgtttggatgtctacattccttatcaaaggatataaatactgtgtatgcttttgaattttatttttaggaaaattctgaagccagctatcacaggtttgttagctaataatagtattttcttttagttgagttaggtttttccccatctcctgtagagcgaatttacatattgtattgggtaagtgttcactacttttcctgattaagggatctgtgctggggaacaaagcttttgcagtaccttatattgtagttaaaattttatttaacatatccttcagtgagctcatttcacactgtagcctcttccttaaaatttgtggtgctcctgtaacagtaagaactaattctgaaataaaagacatctcctaatgctgtgcaaacatagtttacatgtattgaaggaggcagttgttaaattgagtgaccaatttaagcaatcagatatttgaaaactgcaccctttagttttgaaactgtgaattagaaacacttttcctgctgtattactacctgctttaacatccaaatatacagtgattttaaatgataacatactgtggttattagattaacagcttgattttgaatgttcagatgataatgcagaagacatcacttctagtaaggattttgactagtgcattgatgttgaagttggtgccatttcaaaatgtggcaggtgataatcttttaccataatttgcataaaactgtaatagaagtttattttgagatgttagtatattatgtactatgcatttctgtggtatagatgttgtggatatatttaagtatttggttacatggttttacaataaattacaatactgcaggctctaggactgaacaggagactgacatgcatatgttgtgtgaatgtcttagttgggtaaagttaaatccaaatacttcaactggctttttcttcagtttgtttgtttttaactttcaagatgcatgttttgttttgttttgctttgtttttgtcttttaagccaattcatttttctaacagttgaaattcttttagtactaaagaaatagatactgctcttttatggctttagtgtttatatacctgtttatatgcatacattaacaaaattagtaacagcagtgcttagaatttcaatgctgtgtcatactgatgattaactccatactcctagtggtgatgtggtccagatactggaatggaagtggcaggatgtggagtccagacatagtctaccactcatgctacttactagtaatattaaggtgttaaacttaggaatttgtcacatgtaggttcctgaggagatctaaaagttaatacaaaaccaagctgtttactgattttcatgagaacatttaagttagtttaggtctacctgatttattttaaaagaaggcagagggctggacgcagtggcttacgcctgtaatcccagcactttgggaggccgaggcgggcggatcacgaggtcaggagatcgagactatcctggctaacactgtgaaaacccatctctactgaaaatacaaaaaattagctgggcgtggtggcagacgcctgtagtcctagctgctacagctgaggcaggagaatggcgtgaacccaggaggcggagctggcagtgagccgagatcacgccactgcactctggcctgggcaacagagcgagagtctgtctcaaaaaaaaaaaaaaaaaaa

SEQ ID NO: 290 - DNA, 731 bp, Homo sapiens
atttacataatttttatgtaaccataattaaaccaaattagtctttttttcttcatacttttcttcggtaaatagtgaagaaataatgggcatatctaattaaccagttctagtgggtgttgtgatatctttatatctagttcagtctcagatgtatgaatatgattatatagtcatgattgaagttcaaaatgaggaagcatacaaaatcctcagccactgaaaaattcagttaacttgtttatactcctgtaagctctagttagtcacaagacaaagtatatagtaacactttgtaatgaagtaacattttctgcccacattaattttactaaagacctaaattgttaaaattaattgccaatctctggatatattatgcttagtaagtgttttgaaattaaagaccttaaacatttcagcaagtaaattttggattctagctctgttttaaattgaatcctaattttcaaaccactgctaccccagattcatacctgtttttgaaatcttgtttatggaatggaaaattgacagtatggtaatagtttattgactgattggacaaaggatattctggttttaactgacttttccatttaaataaaattcatttgataattttggttgcaaaagtggaacacagtggaagtatttggctacagactacccaaatctcatcagataaggctgttttcttaaaggaaatgcaaaatgaaatcatatgtttt

SEQ ID NO: 291 - DNA, 435 bp, Homo sapiens
gtattctttaagaacagctataatgacattgcatattaaacatcatactctgacatctaatctgatttttaaaaattcatatactaatgtgccttaaaaatgtcacttcaagtctacttttctttttttctcttgttttgatgttatgggtaagcactagtaataaaaaatttaaaaatattgtggtatgacaacatatgtggcactcaaaatgctggtaactgcattactgcagtttttagtgtgccaagtagcagtgcaaaatgatgacagcaccacataagtctcctttgcatttgttcaactctgccattctaatgtgaaagcaatcatagacaatacctaaacgaatgagtgtggccatgttccaataaaatttcatgagcactgaaagttgaattttacataattttgatgtgttacaaaatactactg

SEQ ID NO: 292 - DNA, 32038 bp, Homo sapiens
tttgcgcctcctgcatcccccgtctcactgttcttcactctgcttgttatcctgccctggactgcccttccctttgcctagaatgctcttcctccagatacctgctttgctcaccctctcgcttccttcagggttttactcaccacatctctgaagcttctctgactactctgtccatccttgacactttctattgcccttccctgcttttatttcctcctgggcacttttcacaaatttgcgacttactttactcatttggttatcatctccttctctcttcaaaacattagtaagcttcatgagagcagggattttgttttgtccactgctatctccccagtgcctagactattgcctggatgatagtagaagctcagggcatatttgttgaatgaatgaatgaatgtgcttcatgtagactgcagtttagctaatacagctagcaaaggaagcagcagtgagaggggttggaggagatccaagagagggagttatgtgaggagtgtcagagttttaaggaaggagtgtgcagttgtatgaaatgtcacaaatcaaataatacaagtttgaatttagaataaacgggtgttcacgtgtaaataagatgtgcaggctactgggttatttacaatatttaaatttgcagcaactgaatttttttattgtttaaatgtgaattggccaagatttaacttatacttaatgtttatggggtgctttgacctttaaaaactgcatttgcgtagtatttcagcttcaatcccacgaggcagtgtggtgaatgttgttacatacttcaagtctgcgtttacagctgaggaaatgctaagacttgagtagatgccttttccaaggtctctgctaggaactagtcaaacaatgcaaaaaactccatcttttaaccagtgttactttcttttatttacacaactaatctgatttagtcaattttactttgtatgtgtatttgtaagctcattaaatcatttaggaataaagatgtggcataaattgactaacagtatattactgatgtgacactggtgggaagatttatgtcaagagacctggacaggcataattggtacactgttaagagggttcagtttgcttagttgataaagtttcatggattcaaatactcctagattcatgtttacttttagattgttttcaggggatgatcatagacaggactatttttcccccaactataacataactgacataaatattgtggtaactactctgataaagcattttgtgaccttcatcttggtttatttctatatattttatgtaaagctgcaattgaatattttcaatatcaagcaatctagctgctaaatagtaacagctgcaagtaccataacagtgctgtagttaaacccacatagacattttctgagctgagaggagcctagtctgatttgttttgaggttatttaaataagttgttactttcgtgtgcagtgttcaaaatatattatccagtacttgatgggtactgttgagggggaaatatctcccaagagtttagagttttgttatgttttgctgtttttttttgtttttgttttttggctttaccaactcagatgtgaattataggtaagtgggaaaaatatatcttctactttcttaattttccacttagcattagctgactttttatatgatgtgaattcattttgttctctcaagttgatttttttagcctaaccattcatatttcagtatgcagtgaataagaatttaagcaaaacaaattttacattttccctaatagaaatctattctttcaaatgtatctacttagagttgctaaaattccaaagttcttgcaaaaatatcttttagttttataaaattcacatagaatgttgttttggcaggtttctgaaggtttgtggatccgaattagtacgccttgaattgtcttgcagccactttcttaatgaaacttgcttagaagttatttctgagatgtgtccaaatctacaggccttaaatctctcctcctgtgataagctaccacctcaagctttcaaccacattgccaagttatgcagccttaaacgacttgttctctatcgaacaaaagtagaggtgagagtaattcataattttcatcattgctattatggtagccaactgaagatttggttttctgtaattgctcataataatgtgttttttatttttaaatcaagtttatgatgccttctgactactctgaaatcaatagagctgattcagtcattgtgaagttatttcaaacctaatatgcttttaaattataaggaaatgttcttctctatgctcttaaaatttttgtgatgctatttatgtccccaggaaaaaaaataagcgttggttgaggtaagccaaaatgctggcagggaatgaattagagaaaggtaggaggataatatgtaagaggacatttgcttgcagtgggaggaagcaaagtgatatttatcctggaccagacttgggggttaaaatttgtaataccatagttaatgagtctcatttaaaaaggaatcatgtcatatatattagtctacttgctttttcactaatatctctaggacatgtttccagggtcagtgcatatattatctaactcttttactgtaatagtgtatgttataccataatctatttaacattctccaaatgatcaacatttagtttttccagttgttttccttttacaaactacctagcactaacattcttctgtgcatagttttttttttcttttttgagacggagtctcactctgttgcccaggctggagtgcaatggcatggtctcagctcactgaaacctccgcctgaccagttcaagcgattctcctgcctcagcctcctgagtatctgggattacaggcacgtgccaccatgcccagctaatttttgtatttttagtagagacggggtttcaccatgagcctgtgcatggttttacacatacttactattactgctgttggatagagtcctagaggtggtattgctaggttaaagagtatgtacctgggcccctgtagtacatactgtttgtcatatactttttccctctgctgcatgcatattggccttctttctattccttgaatgttctgacctggtcccagctcagggcttttgtttttttgcctgtctggaatgtttgtctagctcattatggctgcccttttttcagctcagtgttcaacttgcatatttttttagagatggcttcctggatactgtagcaccccttctagtttgtttccttcatatcatcaagtttcatttcctttttaacatccttgtcactctctgaaatgatacttgttttcttgcttattttctgtcttctcacattaggatataatggtagaagccttgttggtctttttcattgccatatttccagaatctagaatagtacttggtaaagattggccattcagtaaatatttgttaagtaaatgaataaagataaccaaattacttttccaaaatgatataccagtgacttgggagactggattagttctggtgggaatggtttggttcccaagagagcaggtggttgtaaagcaaggatgccttttgtgtttggcctctttgtactgtctgcctcccctttgatcttctgccatgttaagacacagcaggaaagcccttaccagaagccgagcagatgacagtgccatgccccttgaaattcccagcctccatacctgtgagctaaataaactctttttctttatcagctacccaccctcaggtattttgttatagcaacaccgaatgaattaagatggcattattctcaattttgggcaaaatatttagctaggcttcaacaggtgacctggcagggtggaaagaagactttgattctagttctagccctgccagcaataagcttggtaatctaggtgaagacattgtctcagatttccagattttttatttgtaaaatgaaataattattgtccctgaatgccagatgatattagcctgtgttttcattggtctgtggtgaaatgactccccatttgtgtgggtataaaattgctagctatcttttcttgggtaggactgttcattctgaaattatgccatacctgctttttactggcacatttactattttatgggcctaagtactataaacgaaatcctctgagcaaggaggatttaaatgcctcatttaaaattttctgattgtttaataagaaatatagcaggcataattattaaatgtagttattaaatgagcctttgagaagaaaaatagggtaaaaaccaaaaaaatattaacttgctaggcatcttatatctattgtggcttgtgaaaatatatcccatgagatgtttttgaaatgttgtatagtaatgtgatctaagtgtcagagaattattagtctacagttttcttaaatttgtttcagactgatagatatgaccaaattttttaagtgtgatttatgaggattaagaagatttcatatctgaagagtggaaatttatacatatgtacctaggtctagatagcataagctctggtttccctcagttacttaaatacagatgtaaaatcattgtatgaatatattaaataaaatttaggttgtaccctctgttacttcctattaaattttttttattggctcatctggtaaaatatcataaacactacgtaatttttctgacattgaatatgtagaaaaaaattataaaactgagttttcagtgatctatggttgacttaaaattaaagatgctgttattttagtgatataaatggcaaatgtgaaatttagaaaatcttacccaggcagtgtttacttttaatgcctccgaactcattgctttctacctatacttcactctcttattgtctcctcattcttgggatctgtatcagagtcccacatgggcactaagtaaattagaaaaaggagagttggcaaaataatcagctgatttctttaaaaacaaacagaagctacagcactagtattcatggcaatctgtaaacacctccattgtcacttaagcaaagcgttatgtcacctccttcttcctttgatacacacactccttttaccttgcacctaatgatggtgtatgagagcaaacagagaatgagaagacaaggtgtaggagactggtctctctttaaatgttccacaaaatcactggcagtatattctcattctagactctgttttgaagaaggagcagtaattgatttcaaatgcctctgcttgctctaaggacatacgtgaaaagaaaaagaagataataattttagttttcttggagaggttattttgttttaaaagggctacaaattatctggtaccactttaaccctgttttcctgaaccctacaaaattctaaaataagcaaaaattagtattaaaaatatggattgtattatagcatattaacttcacagagaccagtttatgatacaatactgttacattttatgtgcctttacataatttgcattaataaatatagtatatttatgccattttacaagacttagacaagtccgtatgcataatgcataaagcttttgaggattttgaagacctggatttttagtcccaaagtttgggaaaaagctactgaatatattctgttggctgtcctagatattttgcattattatttctttacaccagtctgaatagggttggtggtattctcatctttacacataattaaattatggtctcaaaagattaataaattgcctgctggcacaagcaatagagtcaggatttgaactcaggtcttgtggccttggtgttgtagttaaaattataacatatataaaagcatagaatagtagttattctgatagcttggctatttacctaaaacaaggattttctttactacttactatttctaatttgtagttggtaaggagatacaacatagtaactaacatatacaacattataatccatgataaaatacagactattatgtttatgttttataaatatcttctgcaggaaaacggattttttgtctttttactatgaacaagcttagtttgaagtcttagttgttctgaatttataaatcacaatttgttattcaaattacatttagaaacatttaagtgaaagtttgtagaatcaatacataattaactgctttaagtaagtagtttatataggcctactctcaattttatactgtaatggagagcagcattgagacagataatcctcaaaataattttgacatgtaaaatgatgtgttgttgatagctaggtgatgtattcttaagtcgttagccatagccaggcatgcagcaggcctgatgactcagtaagaatgagacctcaggagaatagaactgtggcagggtcagaattgtcttgtatgctgatgtgggtccctccctgcatcagtggttgttcagaatttttagccttataagatagtaaaatatagttcaacttggtttcttaatttatttcatgagatctttttctttctttagatgtgtttaggattacaatgaaaaatgacttcatcagagaaataacaaatgtcttataaatttagcaaagaaaattcactaactaagctatgtgcagagtcagtggcatatatttgttgaatttcattagactcagagcattaaatacatgcttagtaaagaacaacatactattacatcaataaaagacagaatggacgggtatacagtaagcccaaatatatgctcgcattgtcacaggcttgtccttagttggagggtgatctgtgttgggaaacctttttagaagaaattactcttgagctgagatttatgccctgtttagtgtgtaatcccagaattactagtgaaatgggttggtaaatagggtaattttttttcctcctgaatttggtggatcttttagagttgaatagacagcactttctgcaacagatggggatttagacagggaggacactttagttgtgcttagtttcttctaccatccgtggcatggaaataattaggtattataatgatttaaaggacttaagttcagtctttttggttcttttcttttcataagattcttattaggtacgataaagcattgattgcaagtacttctttaaccatacatgatgatgtattttcgtgaaagtagagctgtaaaaatctagcccattcagctgggctcaggggctcatgcctgtaatcccagcactttgggaggctgaggcagaaggatcacttgagatcaggagttcaagaccagcctaagcaacatagcaagaccccatctctacagaaaatttaaaaaattagctggacatgcccctgtagtcccactcaggagactgaggtgggaggatcacttgagcccaggaggtcgaggctacagtgagctgtgattgtgccactgcactccagcctgagtgacagagcaagaccctgtctcaaaaataaaataaatctgactcattaaattgatttttaaatacttgaaaaaaacttttattttgaaataatttccgacttacagagaaattgaaaaaaaaaatgatttcttatgtattttcacccaggttcccctactatatgcataattgttttagtgaaccatttgaatataagttgaaaacataataaccctttacccctggggcattataagtgaaagacataatttgcccctaaaagggcatatatctgtaatgtactttcaaatacttgtgttatgggctgaattgtatctccctgaaattcgtacattgaagtcctaccccccagtacctaagaatgtgactgtatttgagacagggtttttaaagaggtaattaaggttaaatgaggtcattagggtagagcctaatccaatatgactggtgtccttaaggaagaggagattaggggacacacacacaaggaagaccatgtgaagacaatggaagaagatgacccgctacaagccagtaagagaagtcttagaggaaaccaactctgttgacacctagatctcagatttctagcctccagaattgtaagcaagtaaatttctgatggttaaactacctagtctatgatactttgttatagcagccctagaaaactaatacaccttgtataggatagcataagaaaagttttttaacatagtgcatgagagtgtctttaagataagtcccacacgtactaaaacaatctggactagttttagaagtttgaacctgtttaccttttctctgtttggggaaaaaaaaaatctggagtcaggggtgaaagtggggcatgataggtagctcagtaagaatgttattctgttgcttagcagcagactggaaaaccaggagtgttttttaaaagttggagttataaatggaacacctgcatccagttttgattgcctcacttcaagaatgatagagcataaattgaaagaatctgaagaagtgaaaaaactgattataggtattgtgggggactagtatatgacagtaatccataagtatggttcagcatctgtttacttggcctactcagctgtgtcgacagtttcaaggacccctctgcttttatcttcatgaactagaagacaacaaaagaagttgatctttacttctgtaggatattaacactctcctatttttttctttctgtgccagtttatttggcagagcatatatataagtaaaattgcacaccagcctgactgttaatgaaagcagctgggctttctacaaaaggtgtattaactgtcttttgaaagagtgtgatttaatttagtgctacgaatttgttttctgacatgcgtatatggtggtctccttactgcattcttatttgatttaaacaatacattattgtattttggtaagtagagcagggatgagctttcttttaaaagagccattgcagctaacaaagtcagactataagaccaaactgattggcaaatgaagagggtggcttctcacttacagagccagtgctggtaactaagacgagggtgagaaattaaaatagaaagaaccggctttggtcacctaaattaactaatgcaggatgttgttagttgtcatctaaaatgcagtctatttaaaatagaaatgttaatatagctagataatatgtaaaacagaaagatattagtaattactttgttcttaaacacaatcaagaatcaatagttttaatagctgataataagtttaattatcacagataaaactaacaaactttcttagagtccttggtatgtgtctctaggctatatttctgtatcctgattggccttgtagaactttcaatgggaataggtgacttggtggggtgagtatgtgtgccctgaatgaatggactgtagtccagttacagtcaagaagcctaacttgtgagtgcagaggtggggaagataatcttttaatgggggcagactccttatcaaacacaaccatgacagtgaccaataagccaggtgtaagaaatctacctggaaaggacaccattcattagagatggctgattaacccatcctctcacagttggcatgtcctgaggaaagccaaattaaagttataggactgttaatatgtaaactgccatgtctttaaattttttttttttttttttttggtagagatagggtctcactgtgtttctcaggctggtctcaacctcctgggctcaagtgatcctcctgcctcagccttcaagtgcttggattatatgcatgagccaccacatccagccccatgtctttttgactgcaaatctctgcatccattgtaggttgttatgcaaattgatcagtcgagtatctgtgaggaaagatgtattcgactatattattgtaggaaagatccaatacagtgataaaaataggcttcaaaatgagactgcagggcaaggcaaaggtgtgtgaacatttagtcttagattttgtttcatcacacacaaggattttaagaatttgacaaattatctgaaccttaaactgaaacttgtatgttagagctaaaattctgagtctgtggtctagggtagctattaaacatctacagttaggtttagagaacttctttttcctcaaaggcagtgtaaggaactttattaatttttgcaatttatgatatttagccttttctttttagagatctgtcagaattctaactctccaccacaatgttgatcttaaagttgtgaaagacaatattattttcaaggtgattatgtatcagtatataatctataccatattgtgtatttgaactgtataaaagaataacttctaatagatggttcatagcaaatctggacaaagtaattggatttaaatattctaaaatggtgattatttctacatatgtttagtttcaagtactttaaatagttcttaaaatacttcaactttttttttgttgtttttttttgtttttgaaatggagtctcgctgtgatgcccaggctgtagtgcagtggagcgatcttggctccctgcaacctccgcctccctagtccaagcaattctcctgctgcagcctcccgagtagctgggactacaggcgtgtgccaccatgcccggctgatttttatacttttagtagggatagggtttcaccatatttgccaggctggtcttgaactcctgacctcaagtgatctgccggcctcagcctcccaaagtgctgggattacaggcatgagttactgcacctggctttcaacttttattctatattcttcttcaccaagtttattgaaattggaagagtggagccaaaaaaaatttaattagagaaagatttacacttatacatgtattttacactccagtaattgagtggttgtgttcttaggatttctttggagacatttgttatgcaaatttatgaattttcatttagtgaatatacttttataaaatttcaccaccttactctgagatagtgctctgatgtgtttgaaatgtagtataatcaatgaaagtacatttgtttctgatcacgttatataactagtctatattttagctagtctttgtctgtaatatgtacacttgttacctatcccttattaatatgctttctaggaatcatgttttagaatggagaatactaatttggaatcctactgtcctatattgagtgttataattaagggttacattctttattaaagataaccaacaattcttaacactgagcaaaaaaagtcataaactagttgtaacagctaaaaacttacattaatgtaaaatagcaaacatattactgcatacattgattatacaaggtctcagtatattataaaatgtacaggtatgcataaatataattctaagctataaatctggactatctaaaagttatatttgagtataataaatattggttatttttattaagtagttttgcttagcactttagaagcctggagggtgggaagttataaagtttatgggtaacgtttcttaaaaagctgtcaatgaaaatttgaattaatgccttttatctattaataaatttcttcttaacaagtaaaggcattaataataattctttataactgaatggcacttcatatctgcatacaccaaacttccacatctgttatccatcatttcactaactaaaactgtttttgaaattgaaaccattgtttttttttttttttttttgagacagggtgtcactctgtcacccaggctagagcagtggtgtgatctcagctcactgcaacctctgcctgccaggttcaagtgatccttctagctcagcctccaaagtatctgggactataggcatgcaccaccgtgccaagctaatttttgtattttttgtagagatggggttttgccatgttcccaggctggtctcaaactcctgagctcaagtgatctgcccacctcagcctcccaaagtgcagtgaaatcattttcttagcagtagtcattgtagtcattgtagtagtctgagtatttggaagcttcactaaaggacactagggggaataaacttgctaaacaaacaagaaggcagttgtgaaagtagggggaaacagtcttcctcctgttataatcattggagtatggtgtttatggactaattcctttgcagtcctttcctgagttgtataggaaggtccggaaccctgatgctataagcatgctttacagttgtttttgcctaattgcattaataaaaactgttcacgttgaacttgtctcttgcctttctctccagttataacttgttataatattttgctgtttacttctttacctttggcatttcacaatggctgagtgtcatgtgaccaacttgaatatttaattatgtgtttactcttccagtttgatcccaggttaagaagcgtatgcttcttatgtgtggcgaattgttgaatttattacttgaagttattcattgggttttgaagctgctgaacagggttaataggtagattttaggtggaatgtaaaataaatcattgtttatgaacatgtattctactgctagatgacagcatgcacctagagtatgttttggtaattctgtagaagaaattatcatggacccagtcactccttagtgaatgccttgccatagttgtttaagtaaggttgccctttgtttgaaaattacaaactcatttgaaaatgaatctgctgccttgcactattaaagctgctattttaattatattttagttttatagaactactcttgtacttctattgaatgagttttgagacctaaccagcagaatgtgtagacttggggacctgaaagatactttatgtcttaaataagaggttcatagaatttttcacttttcatttctgaataaatactgtgccattttcacagtacacctaataatatagctttgatccatccatttgtgtgttctagatatgtagcagtgctgcatatactcattatagtagaattgttttgttctcctaagtagagattggcaaactttttctgtgaagggctaggtagtaaatactttaggccttgcaggccctatgggctctatcacagctactcaatcctgctgttgtagtgtgaaaacagtcacagacaatacattaatgagtgggaatgtctgtgttccagtaaaactttatttacaaaaacaggcagtaggctggatttggcctgtggacagtagtttgccaactcctgctccaaactattgagttggtggtctctacaaaatcaggtccttctgtatctggaaatgaagagttaatttctccgtagtttattctctttgctttgacatcagtaacaacattttaattctgaatactaatagcatggagaaagaatattttaaagatattttaggaggaaacgggttaactggatttaaagacattgtaaactgattccataggcatgttctctaaacctgggtactcccagagtctctggcttttgctgatgagctttgctggagaaagccatgaaactgtgttaatttgtgcttactcacctcagtgctacctgtcagccctttgatttatttctatttgacctcttgttaattcctcacagtatctcttccaaggtcatcattgttctttccattaccatcacttccatctcgcaatatcttggtctcagcatttgatctcacgtctcttattcagcaaagatcagttatatcattcaacataaatctcttttattctatgttaattccttttcaagctgaggattttaaaaatgatagttctaatattaaatgattttttaattcccagtttaatgtacagactaagttactgtaaaatatttgctgtgaattcctcttctatgacttgaaattctcccagagaaaataatgcatctaccatttcacaaatgttttctagacatatataattagacttcagttcaaaagtgagttaggaggatatgctgttaggtctgtgccttaaagttacaatctttaagatacacaataagcagaagttgtgatttctctgaagaacagtccagacaggttaatatagtattcttgacaataaatattttttcttaccattatcttactttttttgtttgtttcttttgcagacaggttcttgctcattcgcttaggctggagtacagtggcatggtcacagcttattgcagccttgacctcctggtctcaagcagtcttcccacctcagcctcccaagtagctgggaccacaggcatgtgccactattcctggctaattttttttatttttatttatttacattttttgtagagatgagttcacaccatgttgcccaggctggttttgaaatcctgggctcaagctgtcctccctccttggcctcccagagtgttagaattataggcgtgagccaccacacctggccttactcttacttttaattcaaagaactgattgtatagggaatttatctcaaactgtatcatgagaatcttattgtcccagtctggggataatcagctaggtgacagtgttccaagccaccccacccaggagtttggatggaagtcttagagaaagaagagattttgttttgggcagatataccaaaaagtatatagtgacctggtattggccatgcctcctggtcagaactgagctaagccttctactggtcctgcagtatccgcagtgccactgcagagcaggacctctataccttcagcagaagtcctggttctagaagggagcaatgtgcaagacccttagacaaggaggaataaaaaaagatggggtcaggagatggcagttcaaagaaatagtgaaagtaccttgtgaaaaagaactagaaattttgaaacataaatagactaaaacaagaacacatagttgtgaaaaaaactgattggaaatctagcaaataaagtatagtcattaggaaataatgaatagatgtgataaattctaaattggacacaggattactaaattagaagagaagtctgaggaatgtactcagatttctaaaaggtatgtcagacactgctgtaagttttatacacacccacacaatctcaatcaataaatctctctctctctctctctcatttactcctaaggcaaggcagtcctactcatttaataaatatatattgtgcctactatatactagtgactctgttatttatctattgctatatatcaattgcttcaaaattagtggcttaaaacaacctacatgtattatctcacacgttttctgtgggtcaggaacctgggagtggtttagctgggtagttttggctcagggtctctaaggaggttgcagccaggttgttatctggtgcttgactatggctggtggctcagcctccaaactcagggggatgttgctacagttccccttcagcttgtgaccagaggcccctgttccctccacacaggcctctccataggctgcctgagtgtcctcatgacatggcagctggcttccccacaagggatcaagttgggagggaggaagccaagacaggagccacagcctttttataactgtattaggagggttccaaatcagaaccaataggagataaagatatttattataaggaattggctgacatgatatgaggctggcaagtctcaaaatctgcaggacgaattggcaagctggaaacccaggagagctgatagtgtagttgtagtctgacaggtagcaggtttaagacccaggaagagctgatgtttcagtttataaccaaattcaggaagaaaccagcgtcccagtttgaaggccatcagacattgttttttttcctgaatttggaagaattctctcttatttgagggagggtcagcctgttttttctattcaggccttcagctgatcagatgaggcccacccacattaggtagggcaatgtgctttattcagtctactgatttaaatgttaatctcatccaaaaacaacctcacagaaacacccagaattggcagggcgtagtgactcacacctgtaatttcagcactttaggaggccgaggtgggtggattatgaggtcaggaggtcgagaccatcctggccaacatggtgaaaccccacctctgcataatataaaaattagctgggtgtggtggcacatgcctgtaatcccagccacttgggaggctgaggcaggagaatcgcttaaaccagggagtcagaggttgcagtgagctgagattgtgccactacactcaagcatggggacagagtgagactccatctcaaaaacaaacaaacacccagaattatgtttaactaaatatctgggtaccccatggcctagtaaggctgatacataaaattaaccatcataaatgtaatattgaaagtgacctatatcacctctacaatatactgtttgttaaaagtgagtcgctaagttaagcccactctctcaaagggagaggaattaagctctacctctggaaggaaagcatatagaataacacgtggacatatttttcaaaccactctaaccgctggtactaggagactccagtgttatactccagtgttcattgaatagaagttactgaagaaaaaaatggaaggaatggtagaaaagtaatatttgaagagagaattgttaagaatcattatctttcatgaagagagatatgagtcttcagatcaaaatgggcacttggggttttaaacaaaataaatgaaaatacatttttagacagattgtgatgtaattgcaggagatcaaaaataaagggacaagagctatcagagacaaaagatatattacctgcagaggaaaacaattagattgacagtagacttcttatcaagtaagagactcataagcaatggagtaatgttttcagagtgttgaaagaaggtaactgtcatctgaaaattcgaagtctagctaaactttcgttctagattgaggaaaaatctcaaatatgcacaataaaatttattttaaaaaaagattgagggtaaacattaagttatttaagtttctgtctttctgattccccatttataatgataggataggtaaataacggtatttaccttataggttaactgttctgttcactgttatatcccaagtgcctaaacggtgcctaacacatagtaggcatgcaataactgtttattaaatgaatgaatgagtgaataggattgttgtgaggatttatatatataaagaatttacagcaatgctacctgacatgttaataagtactcaataaatgtttgttgttaagattttatcacctgtagacactcagtaaaagaacaattaaaaatatttctcaacaaaaagacaaattctgtaaggaagtatcagatataaaaaaaaattatgacacagaaattgataaaatgctagtaaattaactaatgaccatggaggggagattaatttaagaaaaattaatctttttgtattatttctaaaaggtaaaaactaaaacctttaaggtgattctaaagttcacatgaaagagcaaagggccaacagcagctaagagatgtttgaagaatgaggaaaagctatttgccatactagatttaaagacttatgaagtataataattaagacagaaatgttggtgcagggaatggaaaatagaccagtgaaacaaaatgacccagaagtagactcatgcgtatatggaaaccttatatatgacagaaagcattacaaatcagtggatacaatgaagtcttcaataaatcaaactggaacaatgtggggaaaatgaaatttgatatcctaccatataagaatcaattgtagttgggttaaaaacctaagtgcaaaaaagaaagactctaaaactctgattttaaaaaaaaagaatcttagattcttccttagctaaagaagaactttttggaaaaaacaacaggatacaaacataagggggaaaaggattaatggcacatttaatatagtcatattaaaatttaaaatgttcacatctcagaaaatccagtaaacagtgaaaagacatgcctcagagaaggtatttatagctgatataactgacaaagattggtatccagcatgaataaagaattccagaagtcaagaaggaagaaacaacccaatggaaagaaaaatcagcaaaggatgtgattaagcaatttacagagcaggaaatatgaatggccaatgaacatatgaaaagatcttcagtctcactagtaatcatactaatgcaaattataccattctgtactcatgagacaggcagatattaaaaaggatgaaaagtctacgtatgttggtaaagatgtggggacctaacagtcttacagtactgatgggagaataggttaatttaagcactcagaagagctattttgcaaagccaaataaagtcaaagaatacataaacacctggaaattctccttctggtgtgttctctagagaaatactcttctataaatgcacaaggaagcacataaaggaatgtttattctaacactgtttgtaatggtgaaaattgtaagcaactaaatatcaatcaaatgagattgtatgctattatatatttgcataatggaatattatacaatttctaatgttaatattatatgctacttatggatacataacgtatagtaaaattgtatattttcaagcatgttttaaacaccaagtcataataaaggttacctctgaggaagtacgtgaatggatggagggatacaaaaatgtagtgaggtaaacaaaatattgagttgataaattgagtggtggctacatggttattatgggcattcttttggaccctacacttgtttgtatatttgagattcttcatagtaagtaatttaaaaataaattaccaaacaagtttcattaaagattagtggactagagctatatgtatcaacatggacagatccctcacactgatgaagaagatgcagaagtatattcacatcgtaataccatttatatagaaaccatgtagaacaatattatgtgctacttatggatacataatgtattggaaaattatatattttcaagcatgttttaaacaccgagtcatgataaagtttacctctgaggaagtatgtgaatggatggagccatacaacaatgtagccagataagcaaagaatgtcaaaatgttaagagttgacaaaactgagtggtggctacatgggtgttatattggaacctatacttgtttgtgtatttgagattcttcatagtaagtaatttaaaaataaattaccaaacaagttgtgtgaattatatgtatgtgtgtatttatctctatgtatgtgtattttttaatttaaaatttcttaccaacaagaatttatgagattctttctaaaaattctaatattctctggatcttacttaagggaaaatcttataaaacaaccttttaatatggatatggtcctgtaattaaaaaaaaaacaaacctaatgttatgttcctgtctgttaattagttaacatggctaagtattgtgaagaacctgaaaattaaattatcttaatataccctttctaatgttaacattctgagagctacatgggattgttttataaatgttgttatgttgaaacttaagtataaaatcaatataaactttttttgtttaaattcaaagaaatgctcaataatgaaataattagacttaagtataatagtcctctgtggcctattgtaactattattatttttgctttaagtaaccttacatttgagaaatattttattactttattttctcaatgagaatctttatctgggatttgaccaaatgttttacattttcattgacacattcttcacctttccctcaactgatagtttttagtttctgatcacttggaacagatttttacagaagttgtataatatcttaatttttaaatatatttaaaaatgtataagatattttgccatgtaagtttgaatagttttctccttaattgataaaagaaaaattagaaatttgaatattttgcattattttgtttttcacaatttttcatagcagacttttttaaaaaaatattttagggtgccatgattatgtagcagtctttgggtttctttagtggtgagaccattttcattgcacaggatagatgggcttaaatggcaggaacatgactagaaagtacatattatatatatttcagtcagcatgttgctactgacaggtgctcaatggttgttggtatccttgtcagcaaagagaatcctttgacattaaagtcaccagctcaatcctgatttggggtgactctattggcagttccatcaagctgcagctgatcagtgaatgtcagagctgcagccattcttcaggagtgtcaccagcctgctgcgggttttttgtctttttgtttttgtttttggagggaggagtggtttagcttgtcttgttgttcaattgtagccagactttcaaattgcttacctttgggaaatgaaccgagaggtcatagggaatataggtatctttagggcatccaaaaccatacacaaagtgattacttacatggagactagtaatgattaccttgactccaagccaatcaatggtggagcctctggggactcattaaatggcatttgtggactctgtaacctagcttttgagctgcatttcaggaaaagcagtgacagcctttaatgtctaattgacctcttctctttgtttcactttcattcactttccatatttgcctctgatgtggtccctaatggcagcaaacagcactgctcagcattttgaacttctgttcagagcttcagcacctcagtttaggcagttgtgtcatggtaagtgtttgagaattctttatactactcaattacttgttctctttttcttcctatgggtgaaatgtatcctgactcaccctaccccacacacacccacagtttttcagatttatggttctcttctttgtcccttgctttcaaacatttttcttaaattggaaagtatgtctttgaaacactgacattatttatccatgagagcaaggaaagaagtatagtgtggtggaatagagtatagttctgcctcaagccagatgttgtctccgacaagctaatcacctctctaggtttcttcacaaactaaggtgttagtcatacctaaatgccgatagttcagtaagtttttcactaagctcattttagcttttaaatcctgagatacttttcttgaaattttaatgataatagataggtttattttatctgtttgtttttgtgtttgttttactgtccttactggtcaaaacagaaagattaacaccctatgttggaactcttttttgtgtgtggaaattttactggtctgtgaaatataaaagcctagggactgttggactagataagcttcaaagtccttccagatttttttttttttttttttttttttgagatggagtcttgctctgttgcccgggctggagtgcagcggcgcgatcttgactcactgcaatctccgtctcccggattcaagcaattctcctgcctcaacctcccaagtagctgggattacagggatgtaccactatgcccggctaatttttttgtatttttagtagagatggggtttcaccctattggtcaggctggtcttgggtttcaccatattgggcaggctggtcttgggtttcaccatattgggtaggctggtcttgaactcctgaccttgtgatccgcccgcctcggcctcccaaattgccgggattacaggtgtgagccactgcgcccagcctagtccttccagatttaaaatacgattttatgtgcccttgaaagagctcatggaaagagttaaatgttttaatctaaaccacataattatatagcttttaaataatactgagatataaaggacaatagaaatcttgtgtggagaaggtgtgcatgtgtgtgtttgtgtgcacacataccgtaagtgaatcttccagtgtaactgactggaagaattcattcctcctcacttcatcccctgttccctaaaacaatgtaggtttaggagatccccagaccattccatttctgccttgcattcacttagtaggaagacttgaattagcaaaatgattgcaagattctagaaaacttctggtatgctagggagtatttgctttaagtaaccttacattttgagaaatattttattagagtcaatagacagggtccctgacctaaaatgagtaccatttgaacacctcttagagctcagtgtggcttcagaaatgcctcaagatttggcagtgtagactaagtaggcctcttttgatgacatatttatctctgtgtccccatggtctttaaaatcttgtggttaggtcttattaaaccctaagtatgggctcaggccatctcagtctctagaaacagtcttgggagcccactagattttcctcacttctggtcaaattctttccatagtaagccatttgataggcttctgtgggtctcttcagtgactcttcttgatggacccgatgacatttgatggcagtttctgtcacaacaaaccagccagttactgccacttggatcttccttattgctagcctgctctctttagattggtaaggaccatttaactttgcttagatgtaccttattctgcttgttatttacctccccttaaactggagcaacattccttagaaaatcaagcctctggccatagactctttactgttggaattatatatatgcttataattgaaattgtattattttaagttagcattttccagagttgacccatggaaaattacctctaaaggataatcaattttaaaggctgtgtatttgggggtggagtggagattcctaatgaaattaggaagccaggtatggttgctcaaacctatagtcccaactactctggaggctgatgtaggaggattgcttgagcccaggagtttgaggctgcagtgagctatggttataccaccgcactccagcctggtcttagagttttacaatggtgtgtgctacaacaaagaaactgtttacctttgctaaaaccagtgttttcaaaccttgcctgactactgaactcatttttctatattacattttccatattacattttattgttgactgtcaatataatagcaatgtttagatttgtgatatttatgaagcaactgttcacagtatacatacatagagcactgtgctgactttcccatggtgattgtgatctattatataccttcgctgagtattcacctcatggcatactttctctgtagtgagtttaatgtagatactaaattagttgtgtcactttttttctgaaactaatctttgtgccacaagtgccagttagacagatttgcagtgacaagaacttctgaggagcagtgtctcacctgtaataaacctgaatattctagtcaatgccgtaaacatgtttttaggactacttagaaatatttatttttcctcttgattgggaaagagacaaattttatctatttctttttacttctaaaaatgactttaaaaagtttaaattccactattatataatgctgattgaagtaatttaaagttgcctaaattaaagaatcctaagacctacctgctattttcttaagtttcctactaattatgtgatcctggttaggtcacttaaattcttgctgatagttcctctgtgacatttgccctatttttaaaattagataatgaataagaaaataaatatgtctaatatttttggggaaaaaagagtcctgcataatatctaaaatttagaaggaattatagttaataaaggagggataggttgactttgttccagtaaaaagtatttagtttcatttttattttcccagccctgaatttggcatgagtagtgctgtgataatttcacaacaacaacaaaaaactcttgaaggaatttctcactgtgttctatgctagtagagaatttgttcaaatgctgctgagattgcccaggcacaaattgggcacagtcagaatcataggtttcataaagtttttaaattttttttttctaagtaagctaattggctgccctaattatcaaacccacagttttgtattgttcaggtatactcacgtaaggagatatgttcccccaaacctgtttctcatagacttccgcatgattccaccatacatacactgacatccagaaccttagaaatcattacctctatatctaatctgtcagcctttggttctaactcaaaaatgcagccccaaatctgtcggatttcttcattccatcattgccaccttaatccaagtccctgtcatctgtcctttacactgttgcagacctcttcaatgagcttccttctccgttcctccccactataggcccatcctccagacagaagccagaggtggttttgtgtcagtttttatgtaaataataatatgtcactcctttgcttagaaccctccattgacttccttagtacttgaaagaaaaatctaactccttcatggtctaaatgtcctggccactgcgtgactctgccctccatagcccgtcctctccctcaccacccttggactgtatggatctcatttttgttcctcgaatgcatcaacctcattcctggagatttcagcaattaccacctcttccctcaacccgtgacactctgatcactctcacatcactctgttttattattttcccactatatgtcactctttgaatgtattttttccttaattagtctgtgtgtctttcctaaaaatatggacagtgtctccttttttcagtttactgctggtcctagcatctggagtggtgcgtagatgtttgttgaaaatacaattaaacaaaagaacaaaaagaaataatcattgtaattgtttactattttgtttccttttgataattttccttgtgataattttaatatctgattttagcaaaatcaaatgaacctcttaaaataacctatttaaagaaacattattaaagcatgtaaagcccaataactgaaatgtttaatccttgattagtagagtcttgtcctgtaatcatgaggtaagcactggacacctccaataactgacagttgattaacatattgtaatctaaattattttcatgttgtatatgcagtccccaaatgcctcatttaagccaaaactagtatccttattagtattatcagcatttccacatagtgttttagagcctaccagatacacatcagggagatcatatatacttgccaaagtatattagccatatataaaacggaggaaagtaggtgctgtcaatgagtagcagcagcaaggttgaaatggtgggcataaaagaagaacatataatcctttaattcttcatgagagactgaagacatagactgctttgggatttaattcattaacatcttctgtctggagtgctcttaaatggatttttaaataaatgagtactcctggctgttttatgaaacagtggcagatccgtgaggtcagtgggcagatctgtattaacaaggatgtggatttgtttacatggaagcaaagcaataggttataattaagaatctgacttactctaaacagtttgcatgtctgagcataacatgtaaaagattggaattatttgatttccagattgaagactatgatgtgatagctagcatgataggagccaagtgtaaaaaactccggaccctggatctgtggagatgtaagaatattactgagaatggaatagcagaactggcttctgggtgtccactactggaggagcttgaccttggctggtgcccaactctgcagagcagcaccgggtgcttcaccagactggcacaccagctcccaaacttgcaaaaactctttcttacagctaatagatctgtgtgtgacacagacattgatgaattggcatgtaattgtaccaggttacagcagctggacatattaggtaaggttacaatatataaatttgttttaaatgtctgtttccttgacagaaaagccaatctcagactttttgttaggaaaaagaaaatttttggatacaataaaaattttatcctgataagatggcttggtttgataggaaatgcaagatagatcagttaatatagggaataattatatatgtactttaataaaatagtgaggacaataacaattttatagttgaaactgtaaaaaactataaccattaattcttggtctacttgtaagagtgagaatttacatgagctgcgctctctatttttattaaggagagaagaaattaattcatttgtataatgaattcaagctagttttttttaagtttcttaattaaaattcttgattaaggaatatcgtgaaatctttatccctgataattctagcgtttaggaatagttctaccccaggcagatctattgaaaatcttttccagctctgggatttcttgaatccttgctgcattcatcagaaaggaaccctgtgtaattttgttgcttcttacttttagccaggggtgctagcagtgtcacagtagttatcattgtccacacaattgatactttgtgaagtcatatcgcacttgcacattttacatcaaatgcatggtgaaaaccattttgaactggggtgacagaaataggaaagtctggaggagctgatttgaaggggtaggaggtaggaatgaagatagtgggtaggatattggcaagattcaggtcctagatgctaaattggctggaaaattcaacttttacttttttaacagaaccatttcaatatgaagtcatgtttgaaaaaatgattttaatttgtaaagggttattttaagttcattacaaacaataaatcatggatggattcattgttagcacattatataaatgttatacttaaggtgttttgttttgttttgttttgtttcccttaaataggaacaagaatggtaagtccggcatccttaagaaaactcctggaatcttgtaaagatctttctttacttgatgtgtccttctgttcgcagattgataacagagctgtgctagaactgaatgcaagctttccaaaagtgttcataaaaaagagctttactcagtgacttaatatatgttctgtattaaaattaatgtgctttgttggggtttaattttgggattggttttgggttttgtttttagttgttttaatggtaagaattaagacatttgtagattttaaagaaaaatatgaaattgtccattaaatcaagtaaaaatgtgcacaaatgttttcataaaatactgcaagcacttctcttcaagaatatgagtggatattatttttaccttatgttaatcagtgatatgctttagtcaataatatgattgataaaagaataacatggaatcatgctaacttattttcaaaggaacactgagcaataaagtatcgtggcatttatgcaaaaaaaaaagttaattttttacaccttcatgtaaggatgtcttattaagcctgtgacctggcaagtgttttgtttggtatgtacaaaatggtcagagctagttggagaatgagacatgcttttccagctgtttggttatttctctggattaactgttcaactggaaaatttttagtttttctagccaggtgtggtggcacacacttgtagtcctagcgacacaggaggtggaggcaggaggattacttgagatgggattttgagactctagtgtacttatgattgcacctgtgagcagccactgcactccaacctgggcaatatagcaagtccctttctcttaaaaaaaattgtagtgtttccacttttcttctgatatttttgtctatttcactactggataatgccaatataaaaatttgggtataatcaagaataagaggtaaactactaaataaaaaaagctttccaactgttagaagcagatgccttaacattttgtgaaaggtaaagttttgaggtttctgaattatataaaaaaacataaatgtggagatatatattatatatacacattatatatacatattatagataatatatatccacatttatgatttttaatatatacatgtatatattatatattatataattatatattacatttatattatatgtaatgtacatgtatatattatatacatatatataattatatatattatatagagagagatatatatcttgctagggtgtgtggatgctggaatataacgattttgcacttaacaggacaatgaattttgttatactacagttaatattagttttgtgttcaaaacagctgtgccttttcatgccacaaaatattttctgtctactttctgagtagcagaattaattcatttttttaacaaaacgatgtatgtcaagtgttcagtagtcacatgaggagaatgcttcctttgtgcctggcactgtttcttgtgctttgcattgactaattcaattctcacaacaaccctgtaagataaatgccattacttacccccatttacagatgaggaaactgaggcaaagaaagattgaagaatttatttatgatcatacagctgctagtggcagagccaacatataaacccaggccatctggcttctgaagcattgcattaaacctgtgcttttaggtgttcagggtagcttctggctctagggcagaggtcaggaaactttttctataaagggccagatagtaaatattttaggctttgtgggctaagaggtaaaactgagattgttatgtagatacttaaataactagagagaaataaaatttgcacgaaaattttattgacaaaattcaaaacaataatttagaacaattttttttgtaatacgggtttactaatgaaaagaattaaatatttacagggaggatcaaagttaatgtttcgtgtcattaaagttgattgtaagtactcatttgttaatgctgatctgtaataagattttatgtattttacttctgaaaattccttgcagataggtattgtcaaatacttacattaatccatgagaatatgatttttgttgagcatattcatcacttgaaaggttacttcttctctggatattttccttttagcatgttattacattgcagcttaatcacttccaattgaagactaggcagaagctcctcaattgcactgttaaattgattttgaaaaatggaaatttcctttacatttgcaaactccaaaaaatactgcaggcactatggtgtgagctacaaatttgtgtgagagtggagatctcgcttctttgtcttaccttttgatagcacaggaaatgtgtaaagcagcttgttgttacttgtaattcaaacaatgttgtcatcaaaatgacttatgttttgcttgtaaacacgttttgccttgtaattttggcttgaattcatttcaaaattttattaagtcttgagcaaaagctaaattccaaagccattcagtgttccataatagtgattgaggacatgtcttctttttcagaaaaatgtcaatatcagccctgaacgcaaaagctcacaatagaactaacactattatgccaatgtggttgggcaaatcagcatattcatcttctgtatctgacaaaagataactgaaccattgatgtttaatctatcagaaactatgagagcaaatgaagttcaccattgctaccagtagttcagtaatacaaaattgaatcaaatatatcccacaaagtacctgctgatgaataatacagtaaataaccatagattttaaataccttcttaccttttcacaggctttataaatttgacaaacgtaatcattttgcttcacacatttttaacaccaccagttgtaacacatcttagcagattctacttcaggttgcatgaaatttgtgttttcttcttataaaatattcatgcttgtaattgtgccacacagataattcatagagactaatttcagtcacttcaacgttggcattgacttatcaaataagcaataactaggcagtgtcagtaacatctgttgactcatcaagagccaaggaaaaccactcagggtcatttgccttgttttttattgactgttgatgttgttcccagtgttctcaattctttaagcaaccattcttgccaaaaggctaatttaatagtcttaagtttactttggacacagtccttcagccgatagaatcaaacacaatttagttatcgttagtaaaatgttttccttgcttggttaacatctgagtcactttggctgcaactttattttcatttttgagtttgtttttttttttttttgagactgagtctcattcttttgcccaggctggagtgcagtggcacaatctcagttcactgcaacctccaccctgcaggttcaagcgagtctcctgcctcagcctcccaagtagctgagattacaggcacatgccaccacacctaactaatttttatgtttttagtagaaatggggttttaccatgttgtccaggctggtcttgaactcctgacctcaagtgatccacccacttcagcctcccaaaatgcttggattacaggcatgaaccactgcatctgacctccctatagtattctttaagaacagctataatgacattgcatattaaacatcatactctgacatctaatctgatttttaaaaattcatatactaatgtgccttaaaaatgtcacttcaagtctacttttctttttttctcttgttttgatgttatgggtaagcactagtaataaaaaatttaaaaatattgtggtatgacaacatatgtggcactcaaaatgctggtaactgcattactgcagtttttagtgtgccaagtagcagtgcaaaatgatgacagcaccacataagtctcctttgcatttgttcaactctgccattctaatgtgaaagcaatcatagacagtacctaaacgaatgagtgtggccatgttccaataaaatttcatgagcactgaaagttgaattttacataattttgatgtgttacaaaatactactgtgttagccattagattttttcagccattagaaaatgtgaaactgttcttatgagctggctggatttggcttgtggaccaaatttgtgacccctattccagagtattttcgagtcagttaatccatgtttgcccattcctaattttataaaccacattcaaacctgttaattcgctgttatcattctcattttgccatttagattttaaaatgaagagcagtgttttgttagaaaaaacaaaatgtttaccataacaagaaagatgtgtagacaagaaagatatttatgtagactctttgtttgttaaattttgaagccaggtgatgcattgttagctttgacaactgacttaaatttttgtataattatttatctttgcattttgctcaggtaaattatcttcccagagtctagaaataaagatatccctgatcctgtttaagagcataaataatactctcaatgtaaattgttttgaaataagatcttaaaaatacaaaatgtagacaattaatattcaggtgcttacttttgagccaatatgtagcagagaaaaactaatttctctgtggcagtatttttatttttggcatttcccaggaattaactgaagactaaaactcatatgtgaagtgtaatgatactaatcaaagagtcagtaaaatttccatttggctaccatgtatgtgtgtatatatttatgtatgtatgtgtgtgttacatatttgagacagggtctcactctattgccccaggctggagtgcagtggcatgatctcagcttactgcagcctcagtctcccaggctcaagcgatcctcccacctcggcctcccgagtacctgggactacagacaccaccacacctggctaatttttttattttttatagagacacagtctttccatgttgcctatgttggtcttgaactcctgggctcaaataattttcccaccttggcctcctgtagtgctgggattacgggcataagccactgtgtcaggccccatgtatg

SEQ ID NO: 293 - DNA, 316 bp, Homo sapiens
tcttgagcaaaagctaaattccaaagccattcagtgttccataatagtgattgaggacatgtcttctttttcagaaaaatgtcaatatcagccctgaacgcaaaagctcacaatagaactaacactattatgccaatgtggttgggcaaatcagcatattcatcttctgtatctgacaaaagataactgaaccattgatgtttaatctatcagaaactatgagagcaaatgaagttcaccattgctaccagtagttcagtaatacaaaattgaatcaaatatatcccacaaagtacctgctgatgaataatacagt

SEQ ID NO: 294 - DNA, 6175 bp, Homo sapiens
tttttttttttcatttctctctctatatattttttattattattatacttttaagttttagggtacatgtgcacaatgtgcaggttagttacatatgtatacatgtgccatgctggtgcgctgcacccgctaactcgtcatctagcattaggtatatctcctaatgctatccctcccccctccccccaccccacaacagtccccagagtgtgatgttccccttcctgtgtccatgtgttctcattgttcaattcccacctataagtgagaatatgcggtgtttggttttttgtccttgcgatagtttactgagaatgatgatttccaatttcatccatgtccctacaaaggacatgaactcatcattttttatggctgcatagtattccatggtgtatatgtgccacattttcttaatccagtctatcattgttggacatttgggttggttccaagtctttgctattgtgaatagtgccgcaataaacatacgtgtgcatgtgtctttatagcagcatgatttatagtcctttgggtatatacccagtaatgggatggctgggtcaaatggtatttctagttctagatccctgaggaatcgccacactgacttccacaatggttgaactagtttacagtccccccaacagtgtaaaagtgttcctatttctccacatcctctccagcacctgttgtttcctgactttttaatgattgccattctaactggtatgagatggtatctcattgtggttttgatttgcatttctctgatggccagtgatggtgagcattttttcatgtgtcttttggctgcataaatgtcttctttgagaagtgtctgttcatgtccttcgcccactttttgatggggttgtttgtttttttcttgtaaatttgtttgagttcattgtagattctggatattagccctttgtcagatgggtaggttgtgaaaattttctcccattttgtaggttgcctgttcactctgatggtagtttcttttgctgtgctgaagctctttagtttaattagatcccatttgtccattttggcttttgttgccattgcttttggtgttttagacatgaagtccttgcccatgcctatgtcctgaatggtaatgcctaggttttcttctagggtttttatggttttaggtctaaagtttaagtctttaatccatcttgaattgatttttgtataaggtgtaaggaagggatccagtttcagctttctacatatggctagccagttttcccagcaccatttattaaatagggaatcctttccccattgcttgtttttctcaggtttgtcaaagatcagatagttgtagatatgcggcgttatttctgagggctctgttctgttccattgatctatatctctgttttggtaccagtaccatgctcttttggttactgtagccttgtagtatagtttgaagtcaggtagtgtgatgcctccagctttgttcttttggcttaggattgacttggcaatgcgggctcttttttgtttccatatgaactttaaagtagttttttccaattctgtgaagaaagtcattggtagcttgatggggatggcattgaatctgtaaattaccttgggcagtatggccattttcacgatattgagtcttcctacccatgagcatggaatgttcttccatttgtttgtatcctcttttatttccttgagcagtggtttgtagttctccttgaagcggtccttcacatcccttgtaagttggattcccaggtattttattctctttgaagcaattgtgaatgggagttcactcatgatttggctctctgtctgtgtacagaactcttaacaatccatccacatgctataaaatgacatcaacttgggtgcattttaaaccctgagattacaggagtctgcaactacactctaaaccctgagattacaggagtctgcaactacactctgttatttatttctgccttctcaataattcctccaaattaagatttacttaaaagtttgatttgctacttaaaccaaaatttgatacagtgttttcctccttttactcataaagtatcatgtatttgccttttgtagaaaccaatcccttcattactatagttcttcagttgttccacagttcttaggcccaaactacttttggtgagctaggatggaatgaatgacacaaggtaaaacacccgtccatctgtttaatcgatatatattgacaacaataatacattgatagctttgagctaggcacagttgaggtaagggtgctgggtatagaaaaggcatataaacaaccacagagcaatttcccaaaatggttatgtatcaagacatttaggtttctttactgctaaacttcagggactttaaaaggctaatggacactgtgaaggtgagttaagatttgtactgtttcccagacttctgtgaatatctatcaacttctcttagaaattagtttttcagagcacagtttggaaaatgccactaacagcactataggatgtattatgaaaagtattcactaaggtcacttttaaccttctcgttaaagattatgcattgtaattttgtttcttttaaaagtatttcttattaagaagaatccttggaagttactgatactttggtgatgtgattttaaaaatatttttgagcatgactgctttttattttgacccttaatttctaagtccaatttttattaatgtattagatttttagaatattcatttacttttagtatcataaaattctgtgaaatacaactcatagtctagtaattgggaataccgtaagggcctgctgttccagctgatgattttaatatgaatatctgtatataggatttaactgtcaagttgctttaattaatatttattatgttgtgctggtccataaactattttaaccatccattgtatagtaatagaaaaaagtagaaattttagattaacttctgataagtgactttttaaattgtttaatatgtaactttttttaaaaagtatagtaaaaattcactgctagcatctgttttgctaaagtctgagaatgaaggaaaaggggtagtttatcatgagaatcatttctttacaaataaatactttaaatgtgaaccctattatatgtatagtcatacatatatatatacacgtatatatatatatacacacctacaattacttatttcttctccagtaaatatatgctaattttgttaaacttttttttagtgggaagttatatttctatagcatatttataaattgctgctaagattacaacaaccaaggcaagagaactgttaatactaacataaattctgacacaccattcttcttacttgatatgttttttgctgacagataacccgcatagagtcaatattgttgaagccctagtaacttcatttgaaagtcataaaataactccatccagtaaaacctaaaataaacgttcttaagtcctaataatcagaaatatttgtcaaattgaaagaatttacaatgtgtgtccctatcatatgttatcctcactgtcagcagggtatgtctggacatgtgcacagaaaagagaaacacttagattgaggacggttctgcctttgtctttcaaagtgccttccgctttacaatctatacagattccttgcaaaatcaagagtcttattcatttcctgctctaggtgcatccattttaccagggcctagagtatgaatggaaagtgctcctggagcatcatcaggccacattcctcggtgccttcagcccttctaaacctgtgtagcaagccactagcctcagttctccgtagccttaaatctcgcctcataaaccatctgggcgattaaaaaaatattttaaacattaaaataccaagtgccaaagaaggtgaatttcttaagcctagtggtacactgataagtggttagctaccaactcttgggagaaaaaagctccagtttgtagtgcttcccaatttttgtcatgtaatactcccatctgtctgatttcaagctatcaatgtgaagtcacttaatgctgagttggaatgagacgcacatactttgctcttttgagatgatatgaactggctccaggtcccctctgccagataaagttattaaacattgatcccataatttctgaaaaataggcataataagctatagctggctttccctcagaggtggtattatgtgtagttaaatggtccttcaaaatctatgaaattcctatttgccatcgaatacattataagaatacaattaaaagaaattttctaaacattcaataatcatgtaagaaaattaagcatattaagaaaagctttgaaaaattttataagaagcaaattattttgctgatgtaaatctgacataaatcatatacattgacaagagcattgtatgtttatgggattataagtttttaaagagtttccctgtatttccatggctttgaaaattatatccccagataaattgtggcatttcctttgtgcatgttggtgcaattttacattatgaaattgtcatgtagattcattacacctattttccaaacaaaaatgaccataattcaaatatgtacctatcatataccaagttctaaactgtataaaaacattctatcactaatgtatttgcaggcacattaataagatatttacccatttttataacaaagattcttggtcagaaaaacctcagaatttttacttttgataatctttctgtttcaggtaccagacttttaatccagatttgggagcatatatgtattagcttttattagagtacaatgggtaacaaactacctcaactgtttcagtagctttcaacaacatatatttttcattgtgtggcttgttggctactgtgggttaattgctctggctgcacttcaggatgtgattcaggttcaggtttactctattcaggccctgggctgaaagagaaggtcctacctgggctatgcccttgtagtggcagagggcactaaagcaagagaactggcagcactgggaaatgcattgaaaagctcatcaagtctgtttgcattgtgttgaccaagcaagtcatgtggctaaacccagtcattggtcagcaaagctactcttcctatagggaactattgtaagtcacatccaaaggttttgggaacaaataattctgaataataatacccaaggtactacaatgtactacaaatatttcagctttctgtaagtagccaaaatatcttaatataaaacaaaataacctcttaattttaaaaaaataagtataatattgaatacactggtttaggttcagaatttttagaaagatcctcactgtaagattttcccaaataatcacctaattccatgggaaataaaaaataggataaactaatagaaatatttctgaaacaagagtcatgaggaatccataatcaactgtgctaccttttgactatttaactttgcatctcaacttcctcatctgtaaactaagaaagttgttccacacttttacactgttggcgagactgtaaactagttcagccattgtggaagtcagtgtggtgattcctcagggatctagaactagaaataccatttgacccagccatcccattactgggtatatacccaaaggattataaatcatgctgctacaaagacacatgcacacgtatgcttattgcggcactattcacaatagcaaagacttggaaccaacccaaatgtccagcagtgatagactggattaagaaaatgtggcacatatacaccatggaatactatgcagccataaaaaatgatgagttcatgtcctttgtagggatatggatgaagctggaaaccatcattctcagcaaactatcacaaggacaaaaaaccaaacaccgcatgttctcactcataggtgggaattgaacaatgagaacacatggacacaggaaggggaacatcacactttggggcctgttgtggggtggggggaggggggagggatagcattaggagatatacctaatgttaaatgacaagttaatgagtgcagcacaccaacatggcacatgtatacatatgtaacaaacctgcacgttgtacacatgtaccctaaaacttaaaagtataataataataaaaaaataaaaa

SEQ ID NO: 295 - DNA, 5310 bp, Homo sapiens
tctcgcggccgactcgcaagatggcgccggtgagtgagcgatgtcttggtgggagtgttgtgtggcaatttaatgatttccgctgtaacgatttttgcatctgtcgagtggagacgtctcagtcaagataaagggaggggagtagtgaagtctgggtcagaaacacaaccaagacgcgaggatcctgaactgtttttcgagactccctggcagctgccatgaggtctagtggagttggagctgggcccggaattggtttaggatgggtggttttggacacgcgggaaagagggaggcacaactgtaaatgggccggtggtactgcaatctgagccatttctttactatctcgcgcctgataatgcttttgccactcagcactgggtaggggaatggtgggtaatcgggccggtctgacgacctttgccaggccagagggagctcctaggcgctcagctcccgcgatggccgacatcacaagtttttgagaactttcagttggggaagaagtttctcggtgaagtaatttttagaaaagtataagtctagattccagcaatgtgaaataaacgtgcttcagatgttttacttaagtcattagtaagggaaccagtaagatgttaaaatgttcctaagaatatctgaaaagctagatatacatgcgcaatttacaaataaagttaggataaaattgctgggctagctacaaaactgggtaatgcccagcatggccataaaccctatagggttatctgttccattagacagaagttgtttgtgtctcccaaattaacttctgcgccaactgggtaattatcttttggcacatgttaccatgctacctgagaaagcaaactaatgtgtaatacttggtagccacttgggtgaatctaaattggaggttatagtctgataaatacagatttgtttgttcatattgcagtgaatgtacatggttgctggccacagtaacattttgcttatgtagccatattatatggtcttggtataaaaggtttggatatggaaaatttaagttccacggtgttggtttttaggtttttttttttttttgagacagagtctgttgcccaggtgggagtatagtggcatgatcaggctcactacaacctccgcctcccgggttcaagcaatcctcccgactcagcctcctgaatagctaggattataagcatgcaccaccacacctggctaatttttgtatttttactagagatggggtttcaccatgttggccaggctggccttgaactcctgacctcacgtgatcctcctgcctcagcctcccaaagtgctgggacggcaccttgccttttttatttttattttttctttttcttttcttttctttttttttttttttaccaaagtccccttcccttgcctataataacgtaagaattgaattttctagacataggtgggtggaatcctagctctggcacttacctgagcttgggctaggcagtatactaacctattcccatctgcagtggggtggcagaaaagcacgataatttaaaattgatcattggtagtatagaaaacaatgaaagtccgtaactttttgacaacttgaacatattaggacttggttagaggttcaaatcaaccccggcgtgggtagtggtggtgtttctttattcattgttacatttctgtatatgtaacctaacagtacattgtacagattgcattggtacaaactttaaaattgtttatataaattgaataagttgttttatatagctacataattatttctcatttatgtagcagaaagacaggaagcccaagaggtcaacctggaggtttaatttggaccttactcatccagtagaagatggaatttttgattctggaaattttgtaagtatcattctactcggcttatttttgtaatcagagttattgataatggtttaaatatatagtatttgataataacctaagctctattcctagggtaccttccctagtgaatatctagggttctcttccctagttttgcattttttctgttttaaaataggagcaatttctacgggagaaggttaaagtcaatggcaaaactggaaatctcgggaatgttgttcacattgaacgcttcaagaataaaatcacagttgtttctgagaaacagttctctaaaaggttggtacttttgcaaattttaataaaactatagtagttttggaatatttcatagaatatgtagttattacatgtattctgtttatatgcaagaataaatatgaactttagactaaaggcctacataaatgggaaattcagtaaatgagtggcaattgctgagtctagttgtaagtgtcatttattgctagaatatgagccagttgtgtccacagtcccagtccagtaaattatagaccctgtaaatccaaatggtatataccctttaatgctgagtactttagtatttgagtatgttgcaagaaacatgtctgatgtgtacataggagaattgtctcaagttatttattcagtagaggtagccagttaaagtcaaagtcttaacatcttgctgccagtttttatttgttgaatttattcaccaaatgtgaaatactacatggcagcacaggactgggtaacccaacagtgaaccaagcaggcagtttacccaccaccaagaaacttctagtggagaagagagagtgaaatggaattaatcaagcagtgataagtgctgtaagggcataaaactagttgcagagtttttgggtacgttggtaagttggtcaggaaatgaaatgcagaagtgagccttgcagttgttacaggcaggatgaaccagaagcctggcagattaaagtaatagtaacaaagccagtgtgtctggggtatagtgttctgggaggaatgcatgagattggagggtgtctggggagcagatcttgaaagccatgggatgtgtaatgggaagcaattgtttattgtggctgaaaaagactagggtgatacatctggtggaaactgaagatgtaagagctaatttcagtgagagacaatgatggcttggactaaagtggttgcagtacatgttaactgagattataatcactaaggattcagagataaaaatgtagtagctgtagtagctgtaaatcaagtatcttacagataatcagataattattgtaaaatacaactctagttacattagatgtagagagagcccaagaattttcagagaagttgagacttaatgagcatagtatgggtttaaccctattattaataggttgcctgttgagccggggtgggattgggagctagggggcttgatagtggtgaaggaggtgttaacgttttcacatatatatacacagataatatatttgaagagtgaaatcatattgcttaaataatttggctgtagcagtttgacaagagaatgctaccctaacaatcttgaacaatatatagtgtggcagtatgacaagaggatgctaccctaacagtcttacacaatacatcctgtgaatggaaggatgaaatattttggaggaagctaggtacagaaaagatgaatatgatgatgtatatttttcgtatagtaaacctttacatagtaggaattgtatttcttaatgaaatttatgtttttattttaaaaggtatttgaaataccttaccaagaaataccttaagaagaacaatcttcgtgattggcttcgagtggttgcatctgacaaggagacctacgaacttcgttacttccagattagtcaagatgaagatgaatcagagtcggaggactaggcaaaggctccccttacagggctttgcttattaataaaataaatgaagtatacatgagaaataccaagaaattggcttttagtttatcagtgaataaaaaatattatactcttgaacttttgtctcatttttttgagtatgctgtttatatgattttgatttccctctgataactatcaacagtatttaaatagcttatagctggtataattttttcccacgatttccaaaatcttttatgtactcaggtaaaagtagcgttatataggaaatcttttttttagacactctcgttctgtcacccaggctggagtgcagtgactcagcttcctaaatagctggaattacaggtgtgagccaccatgcccggctaattttttgtacttttagtagagtagggtttggccatgttggccaggctggtttcaaactcctgacctcaagtgatctacccacctcggcttcccaaagtgctgattatagctgtgaaccaccatgcccggccaggaaatcttactgtagaacaattttttatatagctgtataaaatgtatatgattgtcttgacagtctcaaatactgtttttaatagcttgtaaatgtaatctcaagtgcttagaacagttcttacatataagttgctctgtagtttgctcttatagttagcccaaagactctgggtgtgaggcctgctgtaaaccaatgttaaactgcttattagaaagccctaaccacctgctttgtaggcaccagaaactcaaaaccaaatctcaactcagctacagaatctactgtggtccttgtctgaaaaaattagttcactcggttggaatcttgtctcagagcatcctcatctctttctcaaaagcccctaccccaacaccggcgtgttggttgtctattgaaacttacaagtggatggacctttctcccgaataaactggcctttgaaagctctaatcgaaatgggtttggcaaaatccatactgcaggagattagggaggacaagaatgatgtgcctttttgtactgctgagcctgatggtggtgccactacttcaggtacttagatgagtcttgatgctaatagaattgtgtcgccaaacatatctggacagttacaacctaatctatgcattaattggtttgggaattgcttgaaattattgtttaattcaatgttttaattcgttttcctaaaaatttaagtgcccccatcatcgtgcaatacctcagtgcagcaactccttgattcttggatgactgaacttcctaacttggctctgccccattgttcccatttttcatgtttttcacaaatagttaaccaggtacctactactgtgcaccgctgcagagcattgaggatgtatgtgatgagtaaaaacacccagcctgctctgctgtgttagtattatgacggaaactgatcaaatcacatgtgaacaaatttactgctacaaaagggagggcttaataaaaggaatttcatctgggaaggca

SEQ ID NO: 296 - DNA, 2189 bp, Homo sapiens
actcaacttttttttaattgtatggagactgatgggaaactgaattcatacactgagaagagctacagagaataaaaagaacaaattaatatgtgcatttagaaagcagagggaatagtaatataaaaaaggagttaaaaacataaaagtagagataagtagtgtttcacagagttttctgtaagggtaagtgcacgaaaaatggcaagatggttttaaaagatttagaattcacaaagtagaaagtgacagaaattgaactactcacttaaatttaaaaagagacggggggatagattcagctacttgatggcatgaaatcaaagtacttgaatttttgaagtgtatttaaaaatctagtaaagaatgcctacaattacaaaaggtatgagattgtctttttgagtttagtagaatataaactgacgacaaaagactgacaggcaccaaataagtagagtgtaaaacaacaacaaaaaaaagaaagataaattcaggtaatgatattcaagcagtatgactgcataagattgcataagaaagaatacatttccaaatccaaaacaatatcatcctgttgtattatatgcatatattgaatacaataacaaaagtatcaagagttcttattaaagcacccattatcatttatgtaaaatattgcaagactttaaagtcacagaacaaaacatattttttccccattatcttttttgagatgatcacatttcttcacactttgtgaactgcgtagttaagatggagcaatgatttgaactatttgcaaatgcagttccttccccactctttatatactgtttgggccatgaatctatggaaagaggtgttttacaagaacgaaagtcacatcattcaggactttctagcataaaatgatctaatatgcttagatttaagtggtcagattttgccccttcctccctttcctctccatgttcccagatcatttccagagagataagtaactaattgacagtgttgtttgagagtaaattcctgagttatatagaagttggaacaattattccctcataaaactaaaacaaattctacaatagttacatgaaatgcagaagcacaatcaatgaacattaattcttgactgaaatgaaacagccctggtgttttcatgcaaacttagctgctataaacctaaaagatgcaatcaccaaaagatgtgaagtcttgaggtaaagattagcactataaatgccatttgatatcagatgaaatatgcatttctgtacatgtgtttagaagaatctaagcccctaaaacttctcctcactaaccccaagatgcctgaatttctcaacattaagttttcacatcgtaatacagttttctttcctggtgtttcctcttctctctgcctagtaaaggatgttataaaatcgcagttcaatgtttttttctcttcttgtattttccactctgctggttatggccaatgagtcaagattcaaagtgttcccatatatatctctgcagctcaaactctccagaacttgggcttgtatttccagttactggacttaagctgggcacacccacagtgtccctggactgggtgaggaatgctggaaaccactgcataaacatgaaaaatcattccgtaatttaggcaaagtttggagagagagtcacattttataatagtacaaatacgaacctacaaaagagtagaatcccagactgggccaagaatgctggaaaccactggataaacatgaaaaatcattccataatttaggcaaagtttggagagagagtcacattttataatagtacaaatacgaacctacaaaagagtagaatctaaaatccacatgaatctttagacgaaaactagagatgaaataaagttgctcttagtggggttaggtgagtatgtcattgttagagacagtgatagagaagtctaagaaactccatactgtgctaaataaatccaccttttaagtgtggattcctatttttgtgggcttttgttttttattttacattcaaggggtacaactgcagattgggttaacatttttgtgtgaatattgaaacagttgtgaaaggaagtttattaataggaatgaccacaaactatgaaatagactgaatttgtgtctcaccatgtcatcaccatctctcaactctgcacagacccagtgctg

SEQ ID NO: 297 - DNA, 4950 bp, Homo sapiens
ctcttgaagacactggtttcttaacctcagcttcatggataagtacattttgtcttttcttcattgatatgtgctctcctgcattctgttattgtaagacattactgtgaatgtaaagagataatcatttaatactatcagtaagaattcatatatattcttttttttttttttttttttttttttttttttttttgagaatgcagtctccctctctcaccaggctggagtgcagtggtgtgatctcggctcactgcaacctctgcctcctgggttcaagcgattctcctgccttagccaagaattcatattaaagcagtcgtcatttaatgaaattttggacaccctcacttcaggcacatctgctatcaggcaaaattctactcagcttttacactgtgtcagacaatgtgccagacactaagaatgcaaataaaacatagaacctgaaaagttgtgtttcttcaaaggatacatggagacataaataaaagctgtgttgataacagaaataagagtcataaaatgcttccaagaaagaaagtgggctcagaggtatttctttcagggtgagcaggtgtagaccagggagggaaagagttgtatttcaggcaaacacaagccatgaaatggcctagtgagagaaggaaagtaagccgttcaactctggaagaagtaaagggttgaaaggagaagtgaagacacaggcctgacccttaggtaggacccctggctcagctgtcccagtccccagacatggtgggagattgactcaagtcaatgtaccttactgcccttacctgaacatcattacatttcaatgttgaaattcctgtttttaattatattccaagggacctagaatagatggcataaaggggcctcctttcagttgtgttaatcttggagaacccacattagctttgttgccctgggttccaatctcagaagtacatggagaaatatggctgaacagttaaaaagggtggaaaggaggatccaagcaagataaggagtttggactttgctgtgtatttcatgggcggcactggggggttttaaacacagaaaaaaggagaggtttcagaaaggtctctctggcatcacaatagagatttttgaggtaaaagacagggagaaagaaaaacaaacaacaataatcgtggagtagtgatattgacagactgaactaagaaacagtgtggataagaaactttatgctctacagtactgcagtcagcagaataatggtccctctaaaaaaggtaccacaactctatctcttattagtagtgtgatttggggcaatttaaaagccctgatcctcagtttcctcatctgtaaaagaaaaaaaaaaaagaatagcaatgtcttaagtcaggatccccaggatcaaaccctgagatgaagattgtctgcaagtgatttattatagaaatgctaccaagaaaaactcatcaggtaccacagtaagcaagatagggaagaaggtggtttcaggcaaaatattaacatcaatataattctataggggagcctcagggtgtaaattacacctcaggttttcttgctactagaggcaagacggctggtcttttatactctataggaaagtccttggcaaagggtatcctgggaaagaagtaaacttgcaggtggttctgtctggctctctatgccagtacacaaagtgagtctagtagtgtttgggccttcctccaaagagattctcggggcaggctgtgagaagtaaaagaacacagaagctagaggaaggatactcagattcaaccaaagggatcctaggagatctgggtggagactatgtctgccacaagcatctatctcatagaactcttctaagaactgaatgcattcatatctttctttctttggcttttaggattcctaaactatttttcttctggaatagcatgcaatatttagcactctgctctacactcagagtgctcagtgatgaaataattttttcttgacatagcatcaaatccaaaaagggtaaaggcagtggagaaattaagcgaatatgaggaataccataagagaaagaaaaaaaatctgatcccaatttctgactccaaggatagtgctttcctcagggttccacttttatcagttaagatccagtcaaagggtattgactattaggacaggaaaaaatcccactaaagaatacagtaatagtggttattgggaacagccactatctctcaggctctaggagagtacccaaggagggaataactgagtagaacttccccctacccaccctccaccctactaagcctgaaagtaggcgctcattggaaataatatggctgtggtccacttaatgatccagaaatttaaggtgtcacacactgggctgctgaggaaaccatcagctgtgttttcagtaaaacttgctaggaagccattccactgacatgccagtggtactccatagaaagacacatactagggaactggccaaatttactgaagattatgtaacatggccttcttgcacaccactggtcagaaagtcactcactggccaccacaccgtaggagcaagcaggaaagcactggaaccaagaaaaggagcccctttctttctgcagtgttcccctagcaccttctattgacaaagctaaacactgtgccaactgaccataaagacgtttacagatttcagctctaatgtcacaatttagggcaaagaagggtagctgtgaagttgaagagcactaagttaactggcactgacctcagtgacactcctgggatttgggggatgggaggagcatgctgttatgcccaaatcctgctccgtttgtttacttttttcctaattgtctctgaaagaaagagcaggcccaatcttttgggacactatgtagtgagaactggtatgacacatcgtaagtgcacagagagttcaattcagtaactgagacaaagtctagagccgaaccacttgggtctgaacgttagcttcactattaacaagatttgtagccttgcaaaagttcatccttgtatacctcagtttccttacctgtaaaaggagataacagtacctattttatcaaaatgtcaggagaaattaagtattatgtgtaaagcctataaaacaacatcttgcatgtagttagaacctaataaatattagtatattccatgaatggtagcttgtcatttggttttacaatatgtatatattcggttctcatgatgagtttccatttagaactatgcctcataatgctaacactcaacttctctgggtgagattaggctttgctatcaagtcttgcctactcctgggcattgcctgcagctctggcttcagatcctggcactgcccctggctcactgaataagcttcaactagtgcagccaacttacggaggatctgttttctcaagtgaaaaaaagacacaaggttaaacaaatcatctttttttaagatctcttccagttctgactacatttgatccccctcatccccaagtagtaagttatacctaagagggaaagaggagggaattatcatttcgaactcctactcacctgtgccaggagagcactgctgtgactgatttccctgatttcatcctcaccacagtcctaacagattagtattgttaaagtccatttaacaactaagaaagctgaggctcaggaaggtcaagcagtttactcaagatcatattctcagtaagccgcagagtctggattgaaacctggtctttctgtttgggtcgactcaacatttttaaccgtattgtttgcctcctacatcgccttcatctcagacattaagaatcctacctattcaatgcttttcatcctccgctttaaagagataagtgggtgcacaactttttttttgcctgaaacatatcatctaaaagttaagcaaatgaaattcatttaccagttacaggaatctttttcttaaatcactgttaatgtctcacaggaaattagctcttcagtggaaatcagcagcctccctgcatccttttgcccctgtcctcccctctcttggatgcaaacctggcgaaaagaagggaacactgcttggggtcagcgagctgagttccagctccgaatgtaccattttcaccctcgggagtcttctcccctttctctgtgagcaaaggagtgttgggccagaccgtcttaaggattcttccccaggtacaagccggactctggcggctttcctgggcaagggagtgtctccgccttgtctctgccgcaggtccctggttaaattgtcaatttctctgcggaggctgctcactgcatccgctccctccacccctagccctgtagaccccttctctttcccctacttgggaaaagtgaagccccttatccttggatagcctttcaccagacaaccgcagccgtccgctaaattcccctactggcgggacgcgcgggcgggggcctgccccggggaatgcgaggctgcttcccttctgcgtaatcagggtacgcagcctccagttctctaactttctccttctctaagagggaatttcgagaactttaagacaaataagtgactatatagatgaagacatgaaacctctctacacagtgaactcccccacgctacaaggctcccagggatcccaggccttctcccgcaatgccccgccgggtcccccgccccaactccttctcacggcaggatcccgcgccaggacgctcgcagagcccgagatgtggcaccaggcgcgccacaagtccaggtcccgctatttctgctccatcggagcccaggtcggagggagtcagcgcgtcctcctcgcacaggagcctggcgcgcggctcggtcgcacagaggctgaagaaaggtccgcactgggctcgaggcccttcctgccggcctccccacgccgggcctaggctcccctccttcccggctcc

SEQ ID NO: 298 - DNA, 1720 bp, Homo sapiens
ctgctgcactctagcctgggtgcaacagagtgagactccgtctcaaagaaaaaaaaaaagaatatgagctaaattttatcacatatttatgtaaaattttgaattgtatcatacgtatttattcacagcatacttttatttaccaaagtacatcgtacattatacaaatcttaattacatttacattatacatttataatattaaaattgtgcgagtagtcttcaaatatctgacaactttggggtcagtgaattatttaagaaaaaactcagaagagttttgaaaaaggagcaggtgtgattctacaaattcaatatgaggcaccagtgggagaagtcaattggatgagcacatgaaatattaggagtgctcgtgagggggaagtaacaggtctattgtgtgcagtgctgggcaggctgcatatggagaatgtgttaaaagagcatttgcaaacttaagcattacttgaagatattaaacagaatgatggaagcctggtctttgattatttattgctgacatatgcattgcagtgatggcattaatgcctaatgattaagctaacatgaattgacaatgaacaagtcatgctttataaataaaaaatgcatgttgtttgatttgactcattctttgtgaacctatgctagcttcatattctttctctcgatgtcctatttttttggtctatagtttgtgaggttcacctttttcctctttagaaaatggtgatagctttgcttttcaactgactcccctaatgtccacttttcttcagagattacagacaatggttttccaaatctccttattcttttattgccttaggatctaattgcaagcagttgaaagattaaaatcctctaaagaaattaaattatttctaattatcccatgacctgttttaaactacaattttctcttaaagaaacttaccctccatttttcttttaaaattactccctgtgatagagaaagtaggagacaactgtctcaaaaatctgcttgctcctcttgatctattaaaataccattaaaaattttgggtttactttgctggtgtcagttgattttgtgcttactataatagatccatttgaccctttcatattcattgatatgtacatgtactgttttttcctactactgtagtttctcttattcattcaacctcagtgaggaatacaaacatgagtcatgctctcaaagaagcctagaagtaaggctgagatatgtcaacagtgttgtaatgcaagccaggaagaaacatgataaaaggttccagtagcatgtactaagagttcagtagataaggttactttaggtgattatgtataaattttaaaaaaactttctatacgggctttatttaagctggacttctaaagaatcccctatccaagaaaatggttgggccttaataggtctataaattacatgaaattatatgtaatatttggaaaatatgtgtatgcaatatagaatgtatatattgtgatagagagaaaagggcagaataagactactagtattcatcatattctgaaagacatccacacagagtagtgtttggagagttttgcaacattattaaaagagtatgattagaattacattctcattgcttccaaatgttcatcagtgtttttgcttctcaacaatctaagcaagcatgatgaacttttcattgaatttcttgaaacatgcttttccagagac

SEQ ID NO: 299 - DNA, 7109 bp, Homo sapiens
cgcgtcctgagagtcagccctcgccgctgcagcctcggcgcccggccggccggccatggagcgccccccgccccgcgccgccggccgggaccccagtgcgctgcgggccgaggcgccgtggctgcgcgcggagggtccggggccgcgcgccgcgcccgtgacggtgcccacgccgccgcaggtaccgggcgccggtgggcgggggcgccgaccaagtttctctcgctgcaaagatggcgtcagtgctgcccaaacttcgggcccccgggggcggggcagcggggagggcggccgcgtcggtccgcgcgtgtccgtgggtcccgccggggctgcgccgggcggccggggagcccttcccgccgcgccgggctgggggcggggccgggggcggggccgcgccgtccacaccggccgcagccggttttcgaggcgggcgccgagcggatccgcggcggaggttgagggacccccctcccccggccaccgcctccgctgagtctgccccctccccatccgcagggctcttccgtgggcggcggcttcgcgggcttggagttcgcgcggccgcaggagtcggagccgcgggcctcggacctgggggccccccggacgtggacgggggcggcggcggggccccggactccgtcggcgcacatccccgtcccagcgcagaggtgagcgggaggcccggtgcctcgggactcggtgtgcgcaggggcggtgggtggggtgcggagacaccggccccgacggaggccaggtcagggccccaggtttgtaattaccagccacccccaagctcttcagccctggaggagctgagcagaaatgatcgatgactgggagtccctacacctccctccaccgcagttcctcggggctagagctcagaacccggagcgggtggctgtgcgtctctgtgcagaagaggctgcgcggtcggcatggggcgactgtccaggaatccctggggctcctgaccgccacctcccaacccctgccaggccggacacctcggtctggctgccagggcaggggcgggccctggcctggctcgctggggcctggggagctgcccgtgcttccagcccagtctccccctggctgctgccggctgctggccactcccacctcccaggcctggcgtgaggcccacagctgctgttgcacaaccctggttaatgtgtgatggggggaggcctgggcctggcccgcccctctgccagggcttcagacccctgcccagccccagtatctgaaggaaccacagtggagccaagcccgcgatgtggagaactcaggcttcaggagaccctggccctgctcctggcggctccgggtggctttcagctctctctgcaacctgagctgggggaggagccaggcctcatgcccagggctgggagtggggagcctggtgtgcacgcgtgcccaggcctgcacgtggaccgaccaggggaggggcccagagctctggctgggtcacccgcaccccgcccccatctcctccagagccaccccaggaaaagcccggctggacgaggtcatggctgccgctgcccttacaagcctgtccaccagccctctccttctgggggccccggttgcagccttcagcccaggtaagactcagatgtctgcatttaggggtgtgggtggggacagggctcagaacctacagccacccagcctctgtggggcaagcagagccctcaaacctgggactcctttctaaaatggactcccgcaccctcagtgccccctactgaggccaaagcggcaggacccaggccttctggcctccctgacctgctcacctccacgcggctggccacacacgtctgccaaccctttcctgtgccgggggggtttctccccaagccctggggccagctcctccaagacgctctgcccaccagtctcaccggacttggtgaacaggggcagctcaggattagggactccctggacccacccgaagttctaaggcggggggcccgtgtccccacagagcctggcctggagccctggaaggaggccctggtgcggcccccaggcagctacagcagcagcagcaacagtggagactggggatgggacctggccagtgaccagtcctctccgtccaccccgtcacccccactgccccccgaggcagcccactttctgtttggggagcccaccctgagaaaaaggaaggtgagcttgggggcggcccccagggaggggcgggtgtggcggctgagcctgaccctggcccctgttgctgcagagcccggcccaggtcatgttccagtgtctgtggaagagctgcgggaaggtgctgagcacggcgtcggcgatgcagagacacatccgcctggtgcacctggggtgcggcggggcctggggtgcggcggggcctgcgggttggctggggttgtgaggcccggccaggccaccccttcagctcccactggctggctgtgtctcccgcaggaggcaggcagagcctgagcagagtgatggtgaggaggacttctactacacagagctggatgttggtgtggacacgctgaccgacgggctgtccagcctgactccagtgtcccccacggcctccatgccgcctgccttcccccgcctggagctgccagagctgctggagcccccagccctgcctagtcccctgcggccgcctgccccgcccctgcccccgccccctgtcctgagcaccgttgctaacccccagtcctgtcacagtgaccgtgtctaccaggtgggtgaggccacgggtggcagctggggcgggtctcagggctctctggaggggagtgaagccctggctgtgtctccctgtagggctgcctgacgcccgcccgcctggagccgcagcccacggaggtcggagcctgcccacccgccttgtcctccaggatcggagtcaccctgaggtgcgtgtgggctgagggcctgcggctggcaccaggtggggagggtcctggtctcacagcaccccatgtcctgtgaccccccgcacaggaagccccgcggcgacgcgaagaagtgccggaaggtgtatggcatggagcgccgggacctctggtgcacagcctgccgctggaagaaagcctgccagcggttcctggactaagtccggctcgttcaagaacataagctaccaccttctccctccccaccccctccaggcccggggctgaaacagcccgaggacagccccaggggctggctttcaccagctgcagggtctgcttttacttggggtgggggggcggggctgaccctgaaccctcccccccgccaggtcggggaggggtcccaccactcaaagtgcctctaaagaaaccagctttttgcactaaagccaaaccacaccgctgtccccttagccccaagggccctgggggcagccaccctcccgcctgtcggcccgtagatttatcaagggtgttatgggcccagctttggggggccagtcccgatgcactttgaggggtgttggagaggggactcccccactcgcacttaactcaacggctctcgggccctggggctgtttttaccatgtttgtttttgaagctcaggtgtctcacgtctgggctgcaccaggcgaagagagaaattaaagatttgaggtttttccagaagctttgtctgcctctcgggaggaaggccgtggggctgggaccctgtggtgggcaagtgggtggagtctggcagctgcccacagagggccgagggtcacccgtcggccgccgccaccccaggcgaggccggaggaaggatcatctgagacgcaggaggcatctgctggagcagcaatttcccaatttattgaaagtgatcgctttgcaaggatgtctaagctaatcccgtcacagaaaggaaacgcacaggcgcctaggcagaaacttggagactcaccgcagaggccacgtgaacccacggccacagagaggcaggacggcagagccatgatttcccaccgagcgattacgagaacctcttcccccaatagtagacacatctccaatacaaacacaggtttataataagtaataggaagtcaatataatatagattatccccagaaaaaaatcaacaatcttcaaacactgccctttttttgtgtgttttgtttttgttgacaggttgaaagcatgttgaaaaaaataaatatttaagaaaagcacacacagcaccctcactacaagtagttctaaaagggctgcatacaaaacacaatataagatctaaaaaaaaccaccaccattaagtatggctttcttaagagtcgcacatgtcacagaatgagctaaaataagattacttcttttataatattgcaaaaagttccagtttttgcattttctcagttttttaaagaggaagatgtgcaaagttggaagcagtaagctgcgtcttctgagtcagttccctacgtagccctggcagtgtcctgtgtcccaaagctcagagagccccagtgtacaacctggtcaggatccagagcttgacagaaaaatcgtggtgtccctgccccctccccgcccccaaataacaccatccccaatggactgtatttcccactttggtgttgtaaacaccaaaatacaaacagacacaaacaaaaatacaaaatgtgaaatgtaatctacacatttttcctcttcataaaaaaatatttattagtttgaacatcgatttaaaaaaaaatcagtcacataaaaaaaacccttcatgacatgtcttttccctccacgcctcctgagatggacgtgctcacctgggcctcggaaatcccacactcttcagtcggcaaactgcgaacaagaacaggaaatctgccacgcagcaaacacttggggaggtcagtgggacactgttggttttagggaagaaaatgcccctgtagctccggcggggaaccccaaaacggtcagcaaaggcaggccacacggagtgagccggccagatggagcaggacatcctgagtgtggagggggaggcgggcctgggtcctgggcagggtggcctgagagcagggactggtacaaaacccagagacattggtgggtagcaaaggtctggtttccaaatgcattttgtaagaaagtcagtctgtttagaaaaagggtttaaaaatcaggggaaaggtacaaagttctgagaattctcaaagaggccggggtggggctggcctggggtgagggctggagggctccgctgcagctccctggtagccatgctctccccctgggggactcgtgccagagccacccaccttgctcggtaagagtgggcagggctcaccgctgaggggccagcgcttggcccggctcctatccccacactccgtgtgcagaaaaatcttggcctctttctccagctttgaggagcccacagcctccgagctgaggggtgtgtgtgatgacagctccagccagggcaccctgtcattggtagaaccgggggccaatgtcaaaaaacaaaagccgtgactcctgcgctgtacctggagtcctccatgtactcctccacaggacccccggccagccccagccctccccgagcagcagcggtcagggaagctggtgctctacctgacaatgtggggaaaagcctggtatacaggctagaaaaagagagtaaaaactctttccacgcagccctgaagctcagcactccggggggtcttcacacgggcaggtcctggagggaaggaggaggccaccgcgcccacctcccatctgaaggcacagcaccgcagtggtggcctgtgccagaggagggggtgaaggatggaatgtcctcatggtgagtgctgtcagaggcaggcctgaacgagaagacaggccgtggcaacggtcccgaggctgtgagtctaggcagcctgcctccgggacccccaaagccaggcggtgcaccacagcacacaccgtgggacctttgcttttcactcaggaaaagaaagaacatgtgagtgcttctgaaaacacagcaagaggacttgagcacaagctaaaggaaaaacaaccctatatagtttcttcgagtgagaaaaataatgccaaacaaaataattttatgtaactacctcgatatgtctctgactacttaaaaatttggttacccacgcggggaggtgtaagcagcacactgcagttaggaacaccgcctccagtgttagcagcaaaggcaggagcccagctccagcccgtccaggaggggtcagcaggagcggccgggctgggccatgggcagaacaggacgggcagagcccggggtggacgtggcagcccaaggctctccgaggaagtgcacacgactgagccgaggcccttgcagagggaacctggtgtggcctgaagtggtggggggcacagggctgagggtcccctcctggaaggagcccccagggctgtgtccacctaagatagcacctggagccctcggcctccagcagggtctgcagctgtgttgtgtgttaagcaccaaagcccagaggtaagacggtggcagggctctctgtgcacctggattctacaggctgccatgggccacggctgcaccacgggccacggctgcagccacaggcagtgacctggctgctaggggaggggagggcgggctccagccgggctgaccgggtgtctgtaaaactctgcacctgctcaggccaggggcctctgggccgaacacaccaccccgcccagtgcccactggacccggccacaggcccatcacgtgtccaagccaggctggccatcacaggggccactcacacacccgcaccacctgctggggacttaggaccgtgctctcccttcactcaaacccaccctgtgccctcccccaactcacttcatgtctggtcccagagcacccctcttgctggggtcgcacctgcttagcccgcagggctggtttccgtggggggtgggttcagggggaagcagaggaggggccgcgagaggggtgagcgtggccctggccccgcagtggagacccaccggacacacacacgggtggacggagcgaggcagccaccgaccctgccggcgggcgggcctaggagagccaggcgaagtccttgtcagggcctcct

SEQ ID NO: 300 - DNA, 6643 bp, Homo sapiens
cccccttcccccggccaccgcctccgctgagtctgccccctccccatccgcagggctcttccgtgggcggcggcttcgcgggcttggagttcgcgcggccgcaggagtcggagccgcgggcctcggacctgggggccccccggacgtggacgggggcggcggcggggccccggactccgtcggcgcacatccccgtcccagcgcagaggtgagcgggaggcccggtgcctcgggactcggtgtgcgcaggggcggtgggtggggtgcggagacaccggccccgacggaggccaggtcagggccccaggtttgtaattaccagccacccccaagctcttcagccctggaggagctgagcagaaatgatcgatgactgggagtccctacacctccctccaccgcagttcctcggggctagagctcagaacccggagcgggtggctgtgcgtctctgtgcagaagaggctgcgcggtcggcatggggcgactgtccaggaatccctggggctcctgaccgccacctcccaacccctgccaggccggacacctcggtctggctgccagggcaggggcgggccctggcctggctcgctggggcctggggagctgcccgtgcttccagcccagtctccccctggctgctgccggctgctggccactcccacctcccaggcctggcgtgaggcccacagctgctgttgcacaaccctggttaatgtgtgatggggggaggcctgggcctggcccgcccctctgccagggcttcagacccctgcccagccccagtatctgaaggaaccacagtggagccaagcccgcgatgtggagaactcaggcttcaggagaccctggccctgctcctggcggctccgggtggctttcagctctctctgcaacctgagctgggggaggagccaggcctcatgcccagggctgggagtggggagcctggtgtgcacgcgtgcccaggcctgcacgtggaccgaccaggggaggggcccagagctctggctgggtcacccgcaccccgcccccatctcctccagagccaccccaggaaaagcccggctggacgaggtcatggctgccgctgcccttacaagcctgtccaccagccctctccttctgggggccccggttgcagccttcagcccaggtaagactcagatgtctgcatttaggggtgtgggtggggacagggctcagaacctacagccacccagcctctgtggggcaagcagagccctcaaacctgggactcctttctaaaatggactcccgcaccctcagtgccccctactgaggccaaagcggcaggacccaggccttctggcctccctgacctgctcacctccacgcggctggccacacacgtctgccaaccctttcctgtgccgggggggtttctccccaagccctggggccagctcctccaagacgctctgcccaccagtctcaccggacttggtgaacaggggcagctcaggattagggactccctggacccacccgaagttctaaggcggggggcccgtgtccccacagagcctggcctggagccctggaaggaggccctggtgcggcccccaggcagctacagcagcagcagcaacagtggagactggggatgggacctggccagtgaccagtcctctccgtccaccccgtcacccccactgccccccgaggcagcccactttctgtttggggagcccaccctgagaaaaaggaaggtgagcttgggggcggcccccagggaggggcgggtgtggcggctgagcctgaccctggcccctgttgctgcagagcccggcccaggtcatgttccagtgtctgtggaagagctgcgggaaggtgctgagcacggcgtcggcgatgcagagacacatccgcctggtgcacctggggtgcggcggggcctggggtgcggcggggcctgcgggttggctggggttgtgaggcccggccaggccaccccttcagctcccactggctggctgtgtctcccgcaggaggcaggcagagcctgagcagagtgatggtgaggaggacttctactacacagagctggatgttggtgtggacacgctgaccgacgggctgtccagcctgactccagtgtcccccacggcctccatgccgcctgccttcccccgcctggagctgccagagctgctggagcccccagccctgcctagtcccctgcggccgcctgccccgcccctgcccccgccccctgtcctgagcaccgttgctaacccccagtcctgtcacagtgaccgtgtctaccaggtgggtgaggccacgggtggcagctggggcgggtctcagggctctctggaggggagtgaagccctggctgtgtctccctgtagggctgcctgacgcccgcccgcctggagccgcagcccacggaggtcggagcctgcccacccgccttgtcctccaggatcggagtcaccctgaggtgcgtgtgggctgagggcctgcggctggcaccaggtggggagggtcctggtctcacagcaccccatgtcctgtgaccccccgcacaggaagccccgcggcgacgcgaagaagtgccggaaggtgtatggcatggagcgccgggacctctggtgcacagcctgccgctggaagaaagcctgccagcggttcctggactaagtccggctcgttcaagaacataagctaccaccttctccctccccaccccctccaggcccggggctgaaacagcccgaggacagccccaggggctggctttcaccagctgcagggtctgcttttacttggggtgggggggcggggctgaccctgaaccctcccccccgccaggtcggggaggggtcccaccactcaaagtgcctctaaagaaaccagctttttgcactaaagccaaaccacaccgctgtccccttagccccaagggccctgggggcagccaccctcccgcctgtcggcccgtagatttatcaagggtgttatgggcccagctttggggggccagtcccgatgcactttgaggggtgttggagaggggactcccccactcgcacttaactcaacggctctcgggccctggggctgtttttaccatgtttgtttttgaagctcaggtgtctcacgtctgggctgcaccaggcgaagagagaaattaaagatttgaggtttttccagaagctttgtctgcctctcgggaggaaggccgtggggctgggaccctgtggtgggcaagtgggtggagtctggcagctgcccacagagggccgagggtcacccgtcggccgccgccaccccaggcgaggccggaggaaggatcatctgagacgcaggaggcatctgctggagcagcaatttcccaatttattgaaagtgatcgctttgcaaggatgtctaagctaatcccgtcacagaaaggaaacgcacaggcgcctaggcagaaacttggagactcaccgcagaggccacgtgaacccacggccacagagaggcaggacggcagagccatgatttcccaccgagcgattacgagaacctcttcccccaatagtagacacatctccaatacaaacacaggtttataataagtaataggaagtcaatataatatagattatccccagaaaaaaatcaacaatcttcaaacactgccctttttttgtgtgttttgtttttgttgacaggttgaaagcatgttgaaaaaaataaatatttaagaaaagcacacacagcaccctcactacaagtagttctaaaagggctgcatacaaaacacaatataagatctaaaaaaaaccaccaccattaagtatggctttcttaagagtcgcacatgtcacagaatgagctaaaataagattacttcttttataatattgcaaaaagttccagtttttgcattttctcagttttttaaagaggaagatgtgcaaagttggaagcagtaagctgcgtcttctgagtcagttccctacgtagccctggcagtgtcctgtgtcccaaagctcagagagccccagtgtacaacctggtcaggatccagagcttgacagaaaaatcgtggtgtccctgccccctccccgcccccaaataacaccatccccaatggactgtatttcccactttggtgttgtaaacaccaaaatacaaacagacacaaacaaaaatacaaaatgtgaaatgtaatctacacatttttcctcttcataaaaaaatatttattagtttgaacatcgatttaaaaaaaaatcagtcacataaaaaaaacccttcatgacatgtcttttccctccacgcctcctgagatggacgtgctcacctgggcctcggaaatcccacactcttcagtcggcaaactgcgaacaagaacaggaaatctgccacgcagcaaacacttggggaggtcagtgggacactgttggttttagggaagaaaatgcccctgtagctccggcggggaaccccaaaacggtcagcaaaggcaggccacacggagtgagccggccagatggagcaggacatcctgagtgtggagggggaggcgggcctgggtcctgggcagggtggcctgagagcagggactggtacaaaacccagagacattggtgggtagcaaaggtctggtttccaaatgcattttgtaagaaagtcagtctgtttagaaaaagggtttaaaaatcaggggaaaggtacaaagttctgagaattctcaaagaggccggggtggggctggcctggggtgagggctggagggctccgctgcagctccctggtagccatgctctccccctgggggactcgtgccagagccacccaccttgctcggtaagagtgggcagggctcaccgctgaggggccagcgcttggcccggctcctatccccacactccgtgtgcagaaaaatcttggcctctttctccagctttgaggagcccacagcctccgagctgaggggtgtgtgtgatgacagctccagccagggcaccctgtcattggtagaaccgggggccaatgtcaaaaaacaaaagccgtgactcctgcgctgtacctggagtcctccatgtactcctccacaggacccccggccagccccagccctccccgagcagcagcggtcagggaagctggtgctctacctgacaatgtggggaaaagcctggtatacaggctagaaaaagagagtaaaaactctttccacgcagccctgaagctcagcactccggggggtcttcacacgggcaggtcctggagggaaggaggaggccaccgcgcccacctcccatctgaaggcacagcaccgcagtggtggcctgtgccagaggagggggtgaaggatggaatgtcctcatggtgagtgctgtcagaggcaggcctgaacgagaagacaggccgtggcaacggtcccgaggctgtgagtctaggcagcctgcctccgggacccccaaagccaggcggtgcaccacagcacacaccgtgggacctttgcttttcactcaggaaaagaaagaacatgtgagtgcttctgaaaacacagcaagaggacttgagcacaagctaaaggaaaaacaaccctatatagtttcttcgagtgagaaaaataatgccaaacaaaataattttatgtaactacctcgatatgtctctgactacttaaaaatttggttacccacgcggggaggtgtaagcagcacactgcagttaggaacaccgcctccagtgttagcagcaaaggcaggagcccagctccagcccgtccaggaggggtcagcaggagcggccgggctgggccatgggcagaacaggacgggcagagcccggggtggacgtggcagcccaaggctctccgaggaagtgcacacgactgagccgaggcccttgcagagggaacctggtgtggcctgaagtggtggggggcacagggctgagggtcccctcctggaaggagcccccagggctgtgtccacctaagatagcacctggagccctcggcctccagcagggtctgcagctgtgttgtgtgttaagcaccaaagcccagaggtaagacggtggcagggctctctgtgcacctggattctacaggctgccatgggccacggctgcaccacgggccacggctgcagccacaggcagtgacctggctgctaggggaggggagggcgggctccagccgggctgaccgggtgtctgtaaaactctgcacctgctcaggccaggggcctctgggccgaacacaccaccccgcccagtgcccactggacccggccacaggcccatcacgtgtccaagccaggctggccatcacaggggccactcacacacccgcaccacctgctggggacttaggaccgtgctctcccttcactcaaacccaccctgtgccctcccccaactcacttcatgtctggtcccagagcacccctcttgctggggtcgcacctgcttagcccgcagggctggtttccgtggggggtgggttcagggggaagcagaggaggggccgcgagaggggtgagcgtggccctggccccgcagtggagacccaccggacacacacacgggtggacggagcgaggcagccaccgaccctgccggcgggcgggcctaggagagccaggcgaagtccttgtcagggcctcct

SEQ ID NO: 301 - DNA, 5177 bp, Homo sapiens
cgcgtcctgagagtcagccctcgccgctgcagcctcggcgcccggccggccggccatggagcgccccccgccccgcgccgccggccgggaccccagtgcgctgcgggccgaggcgccgtggctgcgcgcggagggtccggggccgcgcgccgcgcccgtgacggtgcccacgccgccgcaggtaccgggcgccggtgggcgggggcgccgaccaagtttctctcgctgcaaagatggcgtcagtgctgcccaaacttcgggcccccgggggcggggcagcggggagggcggccgcgtcggtccgcgcgtgtccgtgggtcccgccggggctgcgccgggcggccggggagcccttcccgccgcgccgggctgggggcggggccgggggcggggccgcgccgtccacaccggccgcagccggttttcgaggcgggcgccgagcggatccgcggcggaggttgagggacccccctcccccggccaccgcctccgctgagtctgccccctccccatccgcagggctcttccgtgggcggcggcttcgcgggcttggagttcgcgcggccgcaggagtcggagccgcgggcctcggacctgggggccccccggacgtggacgggggcggcggcggggccccggactccgtcggcgcacatccccgtcccagcgcagaggtgagcgggaggcccggtgcctcgggactcggtgtgcgcaggggcggtgggtggggtgcggagacaccggccccgacggaggccaggtcagggccccaggtttgtaattaccagccacccccaagctcttcagccctggaggagctgagcagaaattatcgatgactgggagtccctacacctccctccaccgcagttcctcggggctagagctcagaacccggagcgggtggctgtgcgtctctgtgcagaagaggctgcgcggtcggcatggggcgactgtccaggaatccctggggctcctgaccgccacctcccaacccctgccaggccggacacctcggtctggctgccagggcaggggcgggccctggcctggctcgctggggcctggggagctgcccgtgcttccagcccagtctccccctggctgctgccggctgctggccactcccacctcccaggcctggcgtgaggcccacagctgctgttgcacaaccctggttaatgtgtgatggggggaggcctgggcctggcccgcccctctgccagggcttcagacccctgcccagccccagtatctgaaggaaccacagtggagccaagcccgcgatgtggagaactcaggcttcaggagaccctggccctgctcctggcggctccgggtggctttcagctctctctgcaacctgagctgggggaggagccaggcctcatgcccagggctgggagtggggagcctggtgtgcacgcgtgcccaggcctgcacgtggaccgaccaggggaggggcccagagctctggctgggtcacccgcaccccgcccccatctcctccagagccaccccaggaaaagcccggctggacgaggtcatggctgccgctgcccttacaagcctgtccaccagccctctccttctgggggccccagttgcagccttcagcccaggtaagactcagatgtctgcatttaggggtgtgggtggggacagggctcagaacctacagccacccagcctctgtggggcaagcagagccctcaaacctgggactcctttctaaaatggactcccgcaccctcagtgccccctactgaggccaaagcggcaggacccaggccttctggcctccctgacctgctcacctccacgcggctggccacacacgtctgccaaccctttcctgtgccgggggggtttctccccaagccctggggccagctcctccaagacgctctgcccaccagtctcaccggacttggtgaacaggggcagctcaggattagggactccctggacccacccgaagttctaaggcggggggcccgtgtccccacagagcctggcctggagccctggaaggaggccctggtgcggcccccaggcagctacagcagcagcagcaacagtggagactggggatgggacctggccagtgaccagtcctctccgtccaccccgtcacccccactgccccccgaggcagcccactttctgtttggggagcccaccctgagaaaaaggaaggtgagcttgggggcggcccccagggaggggcgggtgtggcggctgagcctgaccctggcccctgttgctgcagagcccggcccaggtcatgttccagtgtctgtggaagagctgcgggaaggtgctgagcacggcgtcggcgatgcagagacacatccgcctggtgcacctggggtgcggcggggcctggggtgcggcggggcctgcgggttggctggggttgtgaggcccggccaggccaccccttcagctcccactggctggctgtgtctcccgcaggaggcaggcagagcctgagcagagtgatggtgaggaggacttctactacacagagctggatgttggtgtggacacgctgaccgacgggctgtccagcctgactccagtgtcccccacggcctccatgccgcctgccttcccccgcctggagctgccagagctgctggagcccccagccctgcctagtcccctgcggccgcctgccccgcccctgcccccgccccctgtcctgagcaccgttgctaacccccagtcctgtcacagtgaccgtgtctaccaggtgggtgaggccacgggtggcagctggggcgggtctcagggctctctggaggggagtgaagccctggctgtgtctccctgtagggctgcctgacgcccgcccgcctggagccgcagcccacggaggtcggagcctgcccacccgccttgtcctccaggatcggagtcaccctgaggtgcgtgtgggctgagggcctgcggctggcaccaggtggggagggtcctggtctcacagcaccccatgtcctgtgcccccccgcacaggaagccccgcggcgacgcgaagaagtgccggaaggtgtatggcatggagcgccgggacctctggtgcacagcctgccgctggaagaaagcctgccagcggttcctggactaagtccggctcgttcaagaacataagctaccaccttctccctccccatcccctccaggcccggggctgaaacagcccgaggacagccccaggggctggccttcaccagctgcagggtctgcttttacttggggtgggggggcggggctgaccctgaaccctcccccccgccaggtcggggaggggtcccaccactcaaagtgcctctaaagaaaccagctttttgcactaaagccaaaccacaccgctgtccccttagccccaagggccctgggggcagccaccctcccgcctgtcggcccgtagatttatcaagggtgttatgggcccagctttggggggccagtcccgatgcactttgaggggtgttggagaggggactcccccactcgcacttaactcaacggctctcgggccctggggctgtttttaccatgtttgtttttgaagctcaggtgtctcacgtctgggctgcaccaggcgaagagagaaattaaagatttgaggtttttccagaagctttgtctgcctctcgggaggaaggccgtggggctgggaccctgtggtgggcaagtgggtggagtctggcagctgcccacagagggccgagggtcacccgtcggccgccgccaccccaggcgaggccggaggaaggatcatctgagacgcaggaggcatctgctggagcagcaatttcccaatttattgaaagtgatcgctttgcaaggatgtctaagctaatcccgtcacagaaaggaaacgcacaggcgcctaggcagaaacttggagactcaccgcagaggccacgtgaacccacggccacagagaggcaggacggcagagccatgatttcccaccgagcgattacgagaacctcttcccccaatagtagacacatctccaatacaaacacaggtttataataagtaataggaagtcaatataatatagattatccccagaaaaaaatcaacaatcttcaaacactgccctttttttgtgtgttttgtttttgttgacaggttgaaagcatgttgaaaaaaataaatatttaagaaaagcacacacagcaccctcactacaagtagttctaaaagggctgcatacaaaacacaatataagatctaaaaaaaaccaccaccattaagtatggctttcttaagagtcgcacatgtcacagaatgagctaaaataagattacttcttttataatattgcaaaaagttccagtttttgcattttctcagttttttaaagaggaagatgtgcaaagttggaagcagtaagctgcgtcttctgagtcagttccctacgtagccctggcagtgtcctgtgtcccaaagctcagagagccccagtgtacaacctggtcaggatccagagcttgacagaaaaatcgtggtgtccctgccccctccccgcccccaaataacaccatccccaatggactgtatttcccactttggtgttgtaaacaccaaaatacaaacagacacaaacaaaaatacaaaatgtgaaatgtaatctacacatttttcctcttcataaaaaaatatttattagtttgaacatcgatttaaaaaaaaatcagtcacataaaaaaaacccttcatgacatgtcttttccctccacgcctcctgagatggacgtgctcacctgggcctcggaaatcccacactcttcagtcggcaaactgcgaacaagaacaggaaatctgccacgcagcaaacacttggggaggtcagtgggacactgttggttttagggaagaaaatgcccctgtagctccggcggggaaccccaaaacggtcagcaaaggcaggccacacggagtgagccggccagatggagcaggacatcctgagtgtggagggggaggcgggcctgggtcctgggcagggtggcctgagagcagggactggtacaaaacccagagacattggtgggtagcaaaggtctggtttccaaatgcattttgtaagaaagtcagtctgtttagaaaaagggtttaaaaatcaggggaaaggtacaaagttctgagaattc

SEQ ID NO: 302 - DNA, 2953 bp, Homo sapiens
agctggctgcagggtctctggggagagaagggtctgtgcagggctgtggtgagagacgggctgggctggaggggcctaggaggccggcattctcccttcttacccttctctgaccaaggcagatcggaggccagggtgcccgccaggctgcctgacacccacagatgggtggagctcagtgctgctccagcgggcgagacgggcgggagaggactgtggcccaccacgtggggcactcttggtgaggcaggcggacctggccctgtgggtttgggggttctgtgccagctctgctcacgtcttcgtgtgtggaggggttgtgagttaggctgtcagaacagtgcgggctagaggcgcacacgtttcatctaggcttcgggcggggcgcagcaggtgggtgaggctgcggtggtggctgctgcccagggtgggaggctcaggggaggcgcttggcgacaggagcaggaagtgatgaggtggggagctcagccgagggctgcacaaagaccttcctggcctgccccagacagagctgaggacccctggccgtgggcttggtaagtgccctcctggggggcagctggggtctgggaggccttgggatgtggctgcagctgggtcagtcagccaggctgaagcccactccctgggtctgagcagactggccccaaactccagagaccacccctcaccccccagcttctgtctctgctgctggactgtgctgtttgtaaggcatcccccaccccgagaagttctgctaagatccccaagaaggggacagatcctctctggcagagacactggcagacaagaagagccagagagaagtggggtgggggcatcagcacccccagcagctgctgctgcctgctgacccagcctccagctcctccgggtgcagggtccctcctgctgaccagcctccagctcttcccagttctgggctccgcagcgagcggcttgggggcactacctgacacaggagaccatgtctgggcagagggtggctgcaggtggagtctgtggccctgtggcgcacacccaggggctcccccgatgctggttactatctgggctatggtggccacagctgtcttgcccctcctcacggccgtgctgggtgttaccgtggtcacccgcagggacacggaggggccaggcagagcagccctagttcacctcaccgggagcccccgccagaaggtgggcacctctgggagggagggactgccaggccttggggcttcctgtgctgagtcagagctggaacgggagacgcaggagccccgcagccgcgggaggtgcagatttggggctgccaggtggcgccaggtccccttggccagcccccagcgcccctttcttctgtccccagggcctcggcttcacaggatggggctgccagtgtcctgggcccctcctgccctctgggttctagggtgctgcgccctgctcctctcgctgtgggcgctgtgcacagcctgccgcaggtaggtccctcagccgcgttctgtctggggcctcgctgcggctgccattcacagcccagcgcgggaaggggctggaggcaggtccgcgcacccagctcggcacgcgcgcctgcaccgggccttggacccgaggctgacgaccccgccccccgccccccacctctacccccaaggcccgaggacgctgtagcccccaggaagagggcgcggaggcagcgggcgaggctgcagggcagtgcgacggcggcggaagcggtgagtgccaggctgtcccggggaccagggtggggtccgcagggcaccgaccagccttcctcgcccccagtccctactgaggcggacccacctctgctccctcagcaagtcggacaccagactgcacgagctgcaccggggcccgcgcagcagcaggggtgagcagagggcggggcgggggcggccgggcggggcttactgtgcagcgcgtgccaacccctgggccagacccgctcctgccccctgcccggagtgaactctgccctgaccccacccccagccctgcggcctgccagcatggatctcctgcgcccacactggctggaggtgtccagggacatcaccggaccgcaggcagccccctctgccttcccacaccaggagctgccccgggctctgccggcagctgcagccaccgcagggtgcgctggcctcgaggccacctattccaacgtggggctggcggcccttcccggggtcagcctggcggccagccctgtggtggccgagtatgcccgcgtccagaagcgcaaagggacccatcgcagtccccaagagccacagcaggggaagactgaggtgaccccggccgctcaggtaacgtgggccagggtagggcgctgtgggtggggccggcagatcctcagcaggttggatggtgctgacccctcctcgggttggcttcctgtctccaggtggacgtcctgtactccagggtctgcaagcctaaaaggagggacccaggacccaccacagacccgctggaccccaagggccagggagcgattctggccctggcgggtgacctggcctaccagaccctcccgctcagggccctggatgtggacagcggccccctggaaaacgtgtatgagagcatccgggagctgggggaccctgctggcaggagcagcacgtgcggggctgggacgccccctgcttccagctgccccagcctagggaggggctggagacccctccctgcctccctgccctgaacactcaaggacctgtgctccttcctccagagtgaggcccgtcccccgccccgccccgcctcacagctgacagcgccagtcccaggtccccgggctgccagcccgtgaggtccgtgaggtcctggccgctctgacagccgcggcctccccgggctccagagaaggcccgcgtctaaataaagcgccagcgcaggatgaaagcggcca

SEQ ID NO: 303 - DNA, 5914 bp, Homo sapiens
cggcgagtcttcctcatccttgtcgtccgccaacagcgcatcctcaggggccaggccctcgtcgtcctcgcccagctcctccgcctcccctcgtgggtcctcagggtcctccagatagggcccgtcgcctgggaacagcgcctctggagagccctcgccgcctccgccgccatggtccaggggcccggccatgccgcggccagcacagtcggtgcacacaccgtggcgcctggagccatgcctgatgcccacgctggcggcggacatgaagacgcggctgcacaccttgcacacatacttcttgtccttgctgtggacctgcagaggcagggcagggggtgagcagggcctggtgggttggggggcggggcagggggtgagcagggcctggtggaggtggggggggcaggtggtgagcagggccaggtggaggttggaagagggggcagggggtgagcagggcctggtggaggtggggggggcggggcagggggtgagcagggcccggtggaggttgggaggggggccagggggtgagcagggcctggtgggtggggggggtgcgggggtgagcagggcccggttggggttgggggggcacagcctcccgggccctccgagtgtctgcacaggcagagactcctggtgggggaggtgcgcagacaggagtgctcagaccttgagccccagctcctatcagagccacacagcagaactgcaggtggcaccaaggcagccctgtcccaaggggatgctggcacgagggcggcagtgcccctcccccgcaaacccagcccctaggtgggccagtctcagcgtctacactgtgtgtccaagcacccccaccagaggccccctgggttgacacacttctcacgggggtcacaccaccggcctctgcctaaaagcctggcttcctccaaacctccctgcaggacaggctgagggccccgcattggactggagctcacagagctcttcctgtacccagccgtacagggacgggccggggttggggctgccagccgggcaggtgggcccacacctcagcctggctgcgtggacaccccctcagcccctgaccccctcagtccctgacccctcagcccgaccctgactccaggaacgtgtaaaggaggcaactcccccactctcaggctgtttcaaggtcgactgagacatgcaagaagagagatgagcacttatggtcagaggaggaggtgtggctgccagggagggcagtcgtgctgtgccctgtgctgggcccggcagggagatggggcagcaccctgaagagggcccatgtggcaggacgcgaggtgctgggttcctggagggtctcagcactggcctcaaggcctgagggaactaccacacactgctggggacatgtggccccaggtgggcttccgctgagggtgggtgtggacacctgtgctgtgcagaaccagacctcagacatggccagggatggggagaggtggcccttgtacccactcacgggcaccctcggccacgccagctagaggaggccttggggggctggccctgatccctcacagcacagcccctgtctctgccctccaaggaccgagagggcaggacccacagaggaccccaatagcaacccctggcccctggccaagtccacacgaggggcttctctgaggtgggctggcctcaggtcagtcctccaggctgaacccggcaatgaccccaggctcccctcggctcctccctccatccacagggctgtctcccggggcctgcagcacctctgaggctgcacggagaactgaggctgggatgtgcttgtgagtttagctcttccttaaaccattccaaactcaccagttttctcccatgagcaagtacatacataatcaatgtgtgtcatggcggaagacggtcctgctacacttgcaaagacctctgacgggcaggcaccacagctaccacctccccatcctggggctggacccgggcccttacgtacttcctgcctcagtgttccgaatccacaggccgacaggccacccagcacggcccgacctccccttctagacccgcttccttgagggcagaggtgcctgtaacttcttccacaaagccgggaaccataaagacctcacttctcaaatgtctgcttccagagcaactgtgtgagctctaagcctggaccgggatgggcgctgtccagggatgtgagaccttcaggggcagctggtggctttcagggccagggcagcaccacacagcacacctcagatgcccaaacacgctaaccctagaaacagagcctcagacaacttggtgccagaactgctcctttgggcttttgttttgctgtattttatttatttatttttttgaaacagagtctcgctctgtcacccaggctggagtgtagtgttgccatctcggctcactgccagctccgcctcccgggttcataccattctcctgcctcagcctcccaagtagctgggactacaggcacccgccaccacgcccagctaattttttgtatttttagtagagacggggtttcaccgtgttagccaggatggtctcgatctcctgacctcgtgatctgcccgccttggcctcccaaagtgctgggattacaggcgtcagccaccgcgcccagcctgttttgctgtattttaaaccaaggacttccagaacaaaaattcaagacaagccacagtagaaacttcccagcacagtaacctggtgcacacaggcccaggaagggttggagcggggctagtgaaaaacactgaggccccttgaggcctaggctcccatgtgtgcaggggccagggcacctgaggaggcagcaggggcagcttggggtggcacagggaccatgtggccagggctggatggctgggaactcatgcaaatgggcaaatgccctggaaggaagcaagaaggaagacgggacaccttggcagcccgcccaggctctggggcactgtggctgcaagagcacggctggcccaccctccaaatgtggccctgccaaggcatggggggccctgccccagccactggtgctcttcctggagcgggtggaggggccacccaggccagggaagggctgacagtgctcgtaagtgccatcgtgaaagtggaggctggaccggctagagctgctgtctcacactcgggtctccacgctctcaggtccaggaccccagagaaggccacacacagagcctctcctcagaaaaagtcaagccccatatgcttgcttgtgtttgttgttctttagagacagggtctcactctgttgcccaggctggagtgcagtggtgcaatcacagctcactgcagcctggacctcactgggctcaggtgatcgtcctgcctcagcctctcaagtagctgggaccacacttggctaacttttttttttttttaattttttgtagagacagagtctcgcaattttgcccaggctggtctcaaactcctggcctcaagctattctcctgccccagcctcccgaagtgctaggattacaggcatgtgccaccacacttggctttccatatgttataagtacattttccagggaattatgaccccctgaagcccaatcatgaaccccaggacaaaaatcccagccctggtcggacacagtggctcacacctgtaatcccagcactttgggaagcagaggcaagtggctcacttgaggccaggagttcgggactagcctgggcaacacagcgaaatcccatcaccacaaaacgcaaaaattagctgagcatgttggtgcacacctgtagtcccagctacttgggaggctgaggtgggaggatcgcttgagcccgggaggtcaaagttgtagtgagctgtgtcacgccactgcactccagcctgggtaacacagtgaaaccctgtctcaaaaaaaaaacaaaaaaacaaaccctaaccctatccaacgagaaggaacaggcagccacactgaacctcaaacaggatcaaaacgtttactgagaggttaatacggatttgctgaagaaagacgttgcaatccatgttgttaaaacgtgttagcacctatcagtttaaaaaacaagatgcgattttctctgaataggaaacatgtcggcctggtgcagctacccctccccccgcccccgcggctttttataagtggtttgtaagatcagccctgtggcctgtgtgaacagaagcacatcctccgctacggaaaacaaggctggggccccggcggctccgcgtggatgtgggtctgcttctggccttgcagacctgccatctcgtggtccaggggccccctcccaggactgttccttctctactgtcctccacctcgcaaaggcaaatgtgggggcatcagggaaggccagagcccagcactaagccccgctccatatccactccagcacacatcccaggcggcatccgagggcctggagtggcccttcgcccacagccggccaggcaaacacggggaggccagggccctgcacccctctagctctgcagcttgacctcagggagctcccacaggggtcgttaccccaaatgggtatccaccactgcactggaaaagcagcaaccaacagaacctgacctctggcgctcggttccgccccccagtgggtctccccataaagccccgccccccggtgggtctccccatgaagccccgccccccggtgggtctccccataaagccccgccccccggtgggtcgcaccatgaagccccgccccccggtgggtctcccatgaagccccgccccccggtgggtctccccatgaagccccgcccccggtgggtctccccatgaagccccgccccccggtgggtctcccatgaagccccgccccccggtgggtctcccggtggagctcggctcctgcaggtccgctccggaacctgctgactctcctgcgattcctaaactggcagcgatgctccagagcctcttccgccccgacagcagccccacctctgcccggagcccggggcgcctccactgcctctcctcacacagctgcccgccgcgagctccccctgcaccctgcgcctcggggtgggcgttccaggactccccgaacccttggggccgccccgctctgggctgcctgtgccccacccgcctcactggttgatctcacccacttgagatgccctcgccaggccttttttggcaaatctgcctccctgttcccaggctgcctttttctattatttcctccccaagcaaatccatccactccacacctgctacctgacaacgacctgccagtgctgagctccagggtgggcgcggtgggtgcagacaggtcggcaggcacaaggacagggttctccctcccgaggcagggcgggggcgggggggcgcagaggtggctgagggttgggggctccaagcagagcgagctgagtttgccgaggcctggctgccttggcggccagcaggtgagcagggtgggccgaagcctctgcaggggccatgtggcccagccacacccaggaggccggggcagagcagacaggggcccggggcggatctccctgccctgctgtcgtcccccctgtgcagagtggacccggtgtggggtccggggcggtctgcgccctcatcaggacccgcctgcccggacatcgtggccacgcgcagcgcgcggcacgcggaccctccccgcactcaccagcgtgtggcgcttcatgtgctcgcgccgcgtgaacttcttcccgcagatctcgcaggggtagggccgctctcccgtgtgcgagcgcatgtgtcgcttgaggatgcactggtgcatggccgagaagctgcagtacggacacttgaacttcttcctgatcaccgtgaactcattcactgaaagagagggacccgcgaggcgtcagcagggct

SEQ ID NO: 304 - DNA, 2947 bp, Homo sapiens
agctggctgcagggtctctggggagagaagggtctgtgcagggctgtggtgagagacgggctgggctggaggggcctaggaggccggcattctcccttcttacccttctctgaccaaggcagatcggaggccagggtgcccgccaggctgcctgacacccacagatgggtggagctcagtgctgctccagcgggcgagacgggcgggagaggactgtggcccaccacgtggggcactcttggtgaggcaggcggacctggccctgtgggtttgggggttctgtgccagctctgctcacgtcttcgtgtgtggaggggttgtgagttaggctgtcagaacagtgcgggctagaggcgcacacgtttcatctaggcttcgggcggggcgcagcaggtgggtgaggctgcggtggtggctgctgcccagggtgggaggctcaggggaggcgcttggcgacaggagcaggaagtgatgaggtggggagctcagccgagggctgcacaaagaccttcctggcctgccccagacagagctgaggacccctggccgtgggcttggtaagtgccctcctggggggcagctggggtctgggaggccttgggatgtggctgcagctgggtcagtcagccaggctgaagcccactccctgggtctgagcagactggccccaaactccagagaccacccctcaccccccagcttctgtctctgctgctggactgtgctgtttgtaaggcatcccccaccccgagaagttctgctaagatccccaagaaggggacagatcctctctggcagagacactggcagacaagaagagccagagagaagtggggtgggggcatcagcacccccagcagctgctgctgcctgctgacccagcctccagctcctccgggtgcagggtccctcctgctgaccagcctccagctcttcccagttctgggctccgcagcgagcggcttgggggcactacctgacacaggagaccatgtctgggcagagggtggctgcaggtggagtctgtggcctgtggcgcacacccaggggctcccccgatgctggttactatctgggctatggtggccacagctgtcctgcccctcctcacggccgtgctgggtgttaccgtggtcacccgcagggacacggaggggccaggcagagcagccctagttcacctcaccgggagcccccgccagaaggtgggcacctctgggagggagggactgccaggccttggggcttcctgtgctgagtcagagctggaacgggagacgcaggagccccgcagccgcgggaggtgcagatttggggctgccaggtggcgccaggtccccttggccagcccccagcgcccctttcttctgtccccagggcctcggcttcacaggatggggctgccagtgtcctgggcccctcctgccctctgggttctagggtgctgcgccctgctcctctcgctgtgggcgctgtgcacagcctgccgcaggtaggtccctcagccgcgttctgtctggggcctcgctgcggctgccattcacagcccagcgcgggaaggggctggaggcaggtccgcgcacccagctcggcacgcgcgcctgcaccgggccttggacccgaggctgacgaccccgccccccgccccccacctctacccccaaggcccgaggacgctgtagcccccaggaagagggcgcggaggcagcgggcgaggctgcagggcagtgcgacggcggcggaagcggtgagtgccaggctgtcccggggaccagggtggggtccgcaggggaccgaccagccttcctcgcccccagtccctactgaggcggacccacctctgctccctcagcaagtcggacaccagactgcacgagctgcaccggggcccgcgcagcagcaggggtgagcagagggcgggggcggccgggcggggcttactgtgcagcgcgtgccaacccctgggccagacccgctcctgccccctgcccggagtgaactctgccctgaccccacccccagccctgcggcctgccagcatggatctcctgcgcccacactggctggaggtgtccagggacatcaccggaccgcaggcagccccctctgccttcccacaccaggagctgccccgggctctgccggcagctgcagccaccgcagggtgcgctggcctcgaggccacctattccaacgtggggctggcggcccttcccggggtcagcctggcggccagccctgtggtggccgagtatgcccgcgtccagaagcgcaaagggacccatcgcagtccccaagagccacagcaggggaagactgaggtgaccccggccgctcaggtaacgtgggccagggtagggcgctgtgggtggggccggcaggtcctcagcaggttggatggtgctgacccctcctcgggttggcttcctgtctccaggtggacgtcctgtactccagggtctgcaagcctaaaaggagggacctaggacccaccacagacccgctggaccccaagggccagggagcgattctggccctggcgggtgacctggcctaccagaccctcccgctcagggccctggatgtggacagcggccccctggaaaacgtgtatgagagcatccgggagctgggggaccctgctggcaggagcagcacgtgcggggctgggacgccccctgcttccagctgccccagcctagggaggggctggagacccctccctgcctccctgccctgaacactcaaggacctgtgctccttcctccagagtgaggcccgtcccccgccccgccccgcctcacagctgacagcgccagtcccaggtccccgggctgccagcccgtgaggtccgtgaggtcctggccgctctgacagccgcggcctccccgggctccagagaaggcccgcgtctaaataaagcgccagcgcaggatgaaagcggcca

SEQ ID NO: 305 - DNA, 5796 bp, Homo sapiens
cggcgagtcttcctcatccttgtcgtccgccaacagcgcatcctcaggggccaggccctcgtcgtcctcgcccagctcctccgcctcccctcgtgggtcctcagggtcctccagatagggcccgtcgcctgggaacagcgcctctggagagccctcgccgcctccgccgccatggtccaggggcccggccatgccgcggccagcacagtcggtgcacacaccgtggcgcctggagccatgcctgatgcccacgctggcggcggacatgaagacgcggctgcacaccttgcacacatacttcttgtccttgctgtggacctgcagaggcagggcagggggtgagcagggcctggtgggttggggggcggggcagggggtgagcagggcctggtggaggtggggggggcaggtggtgagcagggccaggtggaggttggaagagggggcagggggtgagcagggcctggtggaggtggggggggcggggcagggggtgagcagggcccggtggaggttgggaggggggccagggggtgagcagggcctggtgggtggggggggtgcgggggtgagcagggcccggttggggttgggggggcacagcctcccgggccctccgagtgtctgcacaggcagagactcctggtgggggaggtgcgcagacaggagtgctcagaccttgagccccagctcctatcagagccacacagcagaactgcaggtggcaccaaggcagccctgtcccaaggggatgctggcacgagggcggcagtgcccctcccccgcaaacccagcccctaggtgggccagtctcagcgtctacactgtgtgtccaagcacccccaccagaggccccctgggttgacacacttctcacgggggtcacaccaccggcctctgcctaaaagcctggcttcctccaaacctccctgcaggacaggctgagggccccgcattggactggagctcacagagctcttcctgtacccagccgtacagggacgggccggggttggggctgccagccgggcaggtgggcccacacctcagcctggctgcgtggacaccccctcagcccctgaccccctcagtccctgacccctcagcccgaccctgactccaggaacgtgtaaaggaggcaactcccccactctcaggctgtttcaaggtcgactgagacatgcaagaagagagatgagcacttatggtcagaggaggaggtgtggctgccagggagggcagtcgtgctgtgccctgtgctgggcccggcagggagatggggcagcaccctgaagagggcccatgtggcaggacgcgaggtgctgggttcctggagggtctcagcactggcctcaaggcctgagggaactaccacacactgctggggacatgtggccccaggtgggcttccgctgagggtgggtgtggacacctgtgctgtgcagaaccagacctcagacatggccagggatggggagaggtggcccttgtacccactcacgggcaccctcggccacgccagctagaggaggccttggggggctggccctgatccctcacagcacagcccctgtctctgccctccaaggaccgagagggcaggacccacagaggaccccaatagcaacccctggcccctggccaagtccacacgaggggcttctctgaggtgggctggcctcaggtcagtcctccaggctgaacccggcaatgaccccaggctcccctcggctcctccctccatccacagggctgtctcccggggcctgcagcacctctgaggctgcacggagaactgaggctgggatgtgcttgtgagtttagctcttccttaaaccattccaaactcaccagttttctcccatgagcaagtacatacataatcaatgtgtgtcatggcggaagacggtcctgctacacttgcaaagacctctgacgggcaggcaccacagctaccacctccccatcctggggctggacccgggcccttacgtacttcctgcctcagtgttccgaatccacaggccgacaggccacccagcacggcccgacctccccttctagacccgcttccttgagggcagaggtgcctgtaacttcttccacaaagccgggaaccataaagacctcacttctcaaatgtctgcttccagagcaactgtgtgagctctaagcctggaccgggatgggcgctgtccagggatgtgagaccttcaggggcagctggtggctttcagggccagggcagcaccacacagcacacctcagatgcccaaacacgctaaccctagaaacagagcctcagacaacttggtgccagaactgctcctttgggcttttgttttgctgtattttatttatttatttttttgaaacagagtctcgctctgtcacccaggctggagtgtagtgttgccatctcggctcactgccagctccgcctcccgggttcataccattctcctgcctcagcctcccaagtagctgggactacaggcacccgccaccacgcccagctaattttttgtatttttagtagagacggggtttcaccgtgttagccaggatggtctcgatctcctgacctcgtgatctgcccgccttggcctcccaaagtgctgggattacaggcgtcagccaccgcgcccagcctgttttgctgtattttaaaccaaggacttccagaacaaaaattcaagacaagccacagtagaaacttcccagcacagtaacctggtgcacacaggcccaggaagggttggagcggggctagtgaaaaacactgaggccccttgaggcctaggctcccatgtgtgcaggggccagggcacctgaggaggcagcaggggcagcttggggtggcacagggaccatgtggccagggctggatggctgggaactcatgcaaatgggcaaatgccctggaaggaagcaagaaggaagacgggacaccttggcagcccgcccaggctctggggcactgtggctgcaagagcacggctggcccaccctccaaatgtggccctgccaaggcatggggggccctgccccagccactggtgctcttcctggagcgggtggaggggccacccaggccagggaagggctgacagtgctcgtaagtgccatcgtgaaagtggaggctggaccggctagagctgctgtctcacactcgggtctccacgctctcaggtccaggaccccagagaaggccacacacagagcctctcctcagaaaaagtcaagccccatatgcttgcttgtgtttgttgttctttagagacagggtctcactctgttgcccaggctggagtgcagtggtgcaatcacagctcactgcagcctggacctcactgggctcaggtgatcgtcctgcctcagcctctcaagtagctgggaccacacttggctaacttttttttttttttaattttttgtagagacagagtctcgcaattttgcccaggctggtctcaaactcctggcctcaagctattctcctgccccagcctcccgaagtgctaggattacaggcatgtgccaccacacttggctttccatatgttataagtacattttccagggaattatgaccccctgaagcccaatcatgaaccccaggacaaaaatcccagccctggtcggacacagtggctcacacctgtaatcccagcactttgggaagcagaggcaagtggctcacttgaggccaggagttcgggactagcctgggcaacacagcgaaatcccatcaccacaaaacgcaaaaattagctgagcatgttggtgcacacctgtagtcccagctacttgggaggctgaggtgggaggatcgcttgagcccgggaggtcaaagttgtagtgagctgtgtcacgccactgcactccagcctgggtaacacagtgaaaccctgtctcaaaaaaaaaacaaaaaaacaaaccctaaccctatccaacgagaaggaacaggcagccacactgaacctcaaacaggatcaaaacgtttactgagaggttaatacggatttgctgaagaaagacgttgcaatccatgttgttaaaacgtgttagcacctatcagtttaaaaaacaagatgcgattttctctgaataggaaacatgtcggcctggtgcagctacccctccccccgcccccgcggctttttataagtggtttgtaagatcagccctgtggcctgtgtgaacagaagcacatcctccgctacggaaaacaaggctggggccccggcggctccgcgtggatgtgggtctgcttctggccttgcagacctgccatctcgtggtccaggggccccctcccaggactgttccttctctactgtcctccacctcgcaaaggcaaatgtgggggcatcagggaaggccagagcccagcactaagccccgctccatatccactccagcacacatcccaggcggcatccgagggcctggagtggcccttcgcccacagccggccaggcaaacacggggaggccagggccctgcacccctctagctctgcagcttgacctcagggagctcccacaggggtcgttaccccaaatgggtatccaccactgcactggaaaagcagcaaccaacagaacctgacctctggcgctcggttccgccccccggtgggtctccccataaagccccgccccccggtgggtctccccatgaagccccgccccccggtgggtctccccatgaagccccgccccccggtgggtctcccatgaagccccgccccccggtgggtctcccggtggagctcggctcctgcaggtccgctccggaacctgctgactctcctgcgattcctaaactggcagcgatgctccagagcctcttccgccccgacagcagccccacctctgcccggagcccggggcgcctccactgcctctcctcacacagctgcccgccgcgagctccccctgcaccctgcgcctcggggtgggcgttccaggactccccgaacccttggggccgccccgctctgggctgcctgtgccccacccgcctcactggttgatctcacccacttgagatgccctcgccaggccttttttggcaaatctgcctccctgttcccaggctgcctttttctattatttcctccccaagcaaatccatccactccacacctgctacctgacaacgacctgccagtgctgagctccagggtgggcgcggtgggtgcagacaggtcggcaggcacaaggacagggttctccctcccgaggcagggcgggggcgggggggcgcagaggtggctgagggttgggggctccaagcagagcgagctgagtttgccgaggcctggctgccttggcggccagcaggtgagcagggtgggccgaagcctctgcaggggccatgtggcccagccacacccaggaggccggggcagagcagacaggggcccggggcggatctccctgccctgctgtcgtcccccctgtgcagagtggacccggtgtggggtccggggcggtctgcgccctcatcaggacccgcctgcccggacatcgtggccacgcgcagcgcgcggcacgcggaccctccccgcactcaccagcgtgtggcgcttcatgtgctcgcgccgcgtgaacttcttcccgcagatctcgcaggggtagggccgctctcccgtgtgcgagcgcatgtgtcgcttgaggatgcactggtgcatggccgagaagctgcagtacggacacttgaacttcttcctgatcaccgtgaactcattcactgaaagagagggacccgcgaggcgtcagcagggct

SEQ ID NO: 306 - DNA, 2943 bp, Homo sapiens
agctggctgcagggtctctggggagagaagggtctgtggtgagagacgggctgggctggaggggcctaggaggccggcattctcccttcttacccttctctgaccaaggcagatcggaggccagggtgcccgccaggctgcctgacacccacagatgggtggagctcagtgctgctccagcgggcgagacgggcgggagaggactgtggcccaccacgtggggcactcttggtgaggcaggcggacctggccctgtgggtttgggggttctgtgccagctctgctcacgtcttcgtgtgtggaggggttgtgagttaggctgtcagaacagtgcgggctagaggcgcacacgtttcatctaggcttcgggcggggcgcagcaggtgggtgaggctgcggtggtggctgctgcccagggtgggaggctcaggggaggcgcttggcgacaggagcaggaagtgatgaggtggggagctcagccgagggctgcacaaagaccttcctggcctgccccagacagagctgaggacccctggccgtgggcttggtaagtgccctcctggggggcagctggggtctgggaggccttgggatgtggctgcagctgggtcagtcagccaggctgaagcccactccctgggtctgagcagactggccccaaactccagagaccacccctcaccccccagcttctgtctctgctgctggactgtgctgtttgtaaggcatcccccaccccgagaagttctgctaagatccccaagaaggggacagatcctctctggcagagacactggcagacaagaagagccagagagaagtggggtgggggcatcagcacccccagcagctgctgctgcctgctgacccagcctccagctcctccgggtgcagggtccctcctgctgaccagcctccagctcttcccagttctgggctccgcagcgagcggcttgggggcactacctgacacaggagaccatgtctgggcagagggtggctgcaggtggagtctgtggcgtgtggcgcacacccaggggctcccccgatgctggttactatctgggctatggtggccacagctgtcttgcccctcctcacggccgtgctgggtgttaccgtggtcacccgcagggacacggaggggccaggcagagcagccctagttcacctcaccgggagcccccgccagaaggtgggcacctctgggagggagggactgccaggccttggggctttcctgtgctgagtcagagctggaacgggagacgcaggagccccgcagccgcgggaggtgcagatttggggctgccaggtggcgccaggtccccttggccagcccccagcgcccctttcttctgtccccagggcctcggcttcacaggatggggctgccagtgtcctgggcccctcctgccctctgggttctagggtgctgcgccctgctcctctcgctgtgggcgctgtgcacagcctgccgcaggtaggtccctcagccgcgttctgtctggggcctcgctgcggctgccattcacagcccagcgcgggaaggggctggaggcaggtccgcgcacccagctcggcacgcgcgcctgcaccgggccttggacccgaggctgacgaccccgccccccgccccccacctctacccccaaggcccgaggacgctgtagcccccaggaagagggcgcggaggcagcgggcgaggctgcagggcagtgcgacggcggcggaagcggtgagtgccaggctgtcccggggaccagggtggggtccgcagggcaccgaccagccttcctcgcccccagtccctactgaggcggacccacctctgctccctcagcaagtcggacaccagactgcacgagctgcaccggggcccgcgcagcagcaggggtgagcagagggcggggcgggggcggccgggcggggcttactgtgcagcgcgtgccaacccctgggccagacccgctcctgccccctgcccggagtgaactctgccctgaccccacccccagccctgcggcctgccagcatggatctcctgcgcccacactggctggaggtgtccagggacatcaccggaccgcaggcagccccctctgccttcccacaccaggagctgccccgggctctgccggcagctgcagccaccgcagggtgcgctggcctcgaggccacctattccaacgtggggctggcggcccttcccggggtcagcctggcggccagccctgtggtggccgagtatgcccgcgtccagaagcgcaaagggacccatcgcagtccccaagagccacagcaggggaagactgaggtgaccccggccgctcaggtaacgtgggccagggtagggcgctgtgggtggggccggcagatcctcagcaggttggatggtgctgacccctcctcgggttggcttcctgtctccaggtggacgtcctgtactccagggtctgcaagcctaaaaggagggacccaggacccaccacagacccgctggaccccaagggccagggagcgattctggccctggcgggtgacctggcctaccagaccctcccgctcagggccctggatgtggacagcggccccctggaaaacgtgtatgagagcatccgggagctgggggaccctgctggcaggagcagcacgtgcggggctgggacgccccctgcttccagctgccccagcctagggaggggctggagacccctccctgcctccctgccctgaacactcaaggacctgtgctccttcctccagagtgaggcccgtcccccgccccgccccgcctcacagctgacagcgccagtcccaggtccccgggctgccagcccgtgaggtccgtgaggtcctggccgctctgacagccgcggcctccccgggctccagagaaggcccgcgtctaaataaagcgccagcgcaggatgaaagcggcca

SEQ ID NO: 307 - DNA, 1665 bp, Homo sapiens
gggtctactgctgagccagtttctcagtctaccacttctgattatcagtgggatgttagccgtaatcaaccctatatcgatgatgaatggtctgggttaagtatgtccttttaaaaattatcagttattttttttcagagttttctttctagcaccctgaattcatgctttatgttttaattttaattctaatttctcacctttaaaggtcataagaatataatttaataccaaatgtactacttgaaacctgattattgaatacctgtagaattaaaactgaattttcgtaattgaggcaatatttaaacaaagttttcttctagttgctctgtagtatttctagtttttaaattttttgttttaaatgaatgtctgtttctcctcctaggtagtataatagactgaattaaatatacagaaatggctttgtatttgtgaagtatacacacatttttgtgccggtagaaaactactttcttaacccagttgccagtagaagtttagttaaaggaagacattttagaagggaagaatatggtttgtatgttcggaaagctcatgccgtcttcatttaaaaaaaaaaaattatgagttttttttcctcacaaacctaaatctcaaaatgtactttgtctgaatttttatttcacatccttttttactatttactgttttctactgttagcacttatatgttccctgtggggttttccaccatttttaagcatatgttttccttctccaagtagagttaagaactctctgaaaatggggactagcactctttcatacactcaggacctagtgcaagcctttatacataggtgttcggtggtaataataatgacaataaaaacactggactatgtgccaggcactggtcttagtcttttggattttattatctcatttaatgcttaaaacatttctatgtggtaggttttatttgtttccacactttccagatgaaaaagttgtgacaagggaaagttatctagcttttcccaggccacacagttagttaaatggaggagggtggtattcataccttgctagtctggctctagagttcatgctcttaaccactatctggtacagccttggtgatgatagtaatcatcaaggtaagctggcgacacagtggttaaagcacagttcttacagattaagggagatgaggagagaaagatcagggaggaccatattgtgaaatgcatgccttgaattgctggctaaaggttagggggctgggggttttcagtactagcttagacagtagatacgaattttagtcccgactctaaaatgtagtagtacctcatatggttagggctttgtcacttgtctgggagctgtaaaatcgagcaaataatgtgtcatatctgttttcataggttgttgtgaggctttaatgagataatgggtgaacatgaaagctctgtaaattacagtcatctctcagtatccatggggggttgattccaggacccccctcaggtaccaaaatccccaggtgctgaagtctcctgtgataaaatggcatagtatttgcatataacctacatatgtcttcccatatattttaaattatctcttgattacttgtagtaactaatacagtgtaaatagttgttatactgtattgtttagggaataatgaca

SEQ ID NO: 308 - DNA, 375 bp, Homo sapiens
cagcctaggcagcatagtgagaccccatctctacaaaaaaaaattagctgggcgtggttcgcatgcctgtagtcccagctactcaggagtctgaagtggaagatcacttgagcctgagaagtctaggctacagtgtgccatgatcttgccactgcactccagcctgggcaatagagcgagaccctgtcataaaaaatacttttactaagcattttactcgatttttatttttcacctccacctcctaccacatgtattaagaaaatgggtgacatgttggtatattgcccactcaattgcctaaactttcttctgcttaatagtttcttttctggcaagaagtcttagagacatggcttatggacggcaattttc

SEQ ID NO: 309 - DNA, 226 bp, Homo sapiens
ctacactccggcctgggcaacaaagtgagactctgtctcgaaaaaagaaaaaaagcccagcatggtggtacaagcctgtggttccagctgaggtaggaggatctcttgagcctgcgaggttgaggctgcagtgagccacgatcatgccactgcacttcagcctgggtgacagagtgagatcctgtctcaaaaaaaaaaaaagagagaaatttataggtaacttacc

SEQ ID NO: 310 - DNA, 3952 bp, Homo sapiens
gattttaatgagaatggcttcattgatgaggaggatctgcagaggatcatcctgcgactgctgaacagtgatgacatgtctgaggacctcctgatggacctcacgaaccacgtgtgtgctgggggctgggagttggtggctggggccggggataggggccaggttgtcacccaaagcccccggatgtcaggccaccctcttgggaggagacccagggccagcctgaggcagatgacacattggcctttggtgcacacattccctgggggctgccaaggggacaggcagctcagggtgcctgaggaatgggcacacagctggaggaactgccctccactttctgtccttcctccaagtcctttccagggtccccagaacacggagcccgacccacccactcgaggggcctccctacatgacagggactgccattggtgggccaacaacagctcaacctcagagggactcatctcaacatcccctccccactctgtcccagcacaacacagtgcccaggtgtcctggagtgacaaacacgaggacggccctgcaaactcaagtcagggcatggatctctgctttcagaacatgacaagtgtccagcatttccagtctcgatggggactagaagataaaaccataagcactgttgagggagtcaccaccgcctccctgcctgcctgggcccccttcagtgcagagcccctgtgtgtactggttggtggggcaggtgggggacactcttgttctctcactgccaggctcgtgctggaggccccaggagtgagaggcaaccagtagggtcccaaactttggtgcacataacctaatctctgtggggtcactggggtcaggggacccaggagacaagtgttaagcatgtgggagagcccctggcatgtggctttccccctccaccctgtgccccacctcactgcctgacatggggttccactcaactgtcttctgtgctccctcgccaggtcctgagtgagtcggatctggacaatgacaacatgctgtccttctcagagtttgaacatgcaatggccaagtctccagatttcatgaagtaaggcattctggagggggtgagactgtccaggagagtggtgggggcaggaagggcccccagtctctcctcactccatgggacatctcagtcttcccaagaaggctgtgagtttccagaatactttgcagattctttcagagtcagcaaaactggagattctgagaaattaggtaaccctggggtattaaaaggcagaggagaggactggatcccaggctttgggaatgacgtcacagctccaacctcagagcattccctgtgccagctgacacacctctgtgcttctcccaaagcccactaggctcctgacgaccccactgcctccagcggccaactgggaggtaggggtttacaggggggatctgaagatgctggtggtggagctcatagaaaagaaacaatgagagaagcacccgaattctatttcttagagcaggaggggccaaagggtcttctgaggcccaaacgtccttgagaaggctggccatctgccagatctccgctggccacgttgaagtctttttggggtgctgctgctttcgggagatgcgtgccccctggaggcagcgcgtgccatggaggaccagccgggtgagctggcgtctcctgctcctgggtccgactctgcccctggtctcagaggtgcgctgatttcaagtatgcccactcaaggtgcttttacagactaagggaaacagaacaaagagctagacctcagccagcaccagggcaggagccggggctgggtccctctgtgccaacgtctctgcctcccatcgcccctccacgctcactctgtgctgtgcaccagctgtctccgctttgtcagacataagaccatgcacggcctccctgcagtggtcaagtttatacctccttggtcttgagtgactttcagtgactcctgagtaacacctctcagctctgactccaaatccccagagacagaatctgagtggccatggtcaggggtcctcccctcttctgactgcctggatgaggagggggctcctcattccaacaggcctgctaggcgctgtggcctggtggcccctctctaaggatgcacacttgggaccaccccagccaaagctaactcctcttgttctgtcacagcccagcacataattgaagctggcaccccgactgctcagagtttctctttgaatctcttccatttctttccactgattcgagcaccacaaggttccttctggtgccctgcctttgccttggggtgatgctgaaagaagcttaaagaaggtttggggttgctttgggatggctgcaaagtggccgtcacccagagaaagggacacgagatgcaggccggggagggagcctccaggactactgtgaacccaggagtcagagggccccttggacctgcgggctcacatggctcacgggattctttctttcagctcctttcggattcacttctggggatgctgatgtagcggcaaatacctgacatggcagcctcgagggagaccacaggaatcgaaccccctccagcactggagggagctggtttgaagtatgactttgtactgggcccacactcacctctagaatattgtttattagataaaagaaaaagcttttccttagcccatcagatcatcgctttttaaatgcagggtcatacatggtactttttattaagaactgccccttccagggcttcagtgtgccagcgatgtcaagcaggctggggtggcaatctttctgagggaatagttcaaatctcaacccatgtcatagcagggggccaagccaaatgggatgaaggtccctagcaagatacatgtccttccctcccttcatcaaaacccccgacccccagcacctcacagttcacagctgcacagagacgtgcacatagcagccattccagccggtgcccggctccccactccccttctgagggagaaggcatcttggccctgattgtgggaccagcaattagagtttatttgctttgctattcagccaagccctggaatgaatttggccaccacagacagcctttggggtccagctcctcagggactttgagacacagaagaagccccccattgggtttttcttatttacactgtcctgggggaggtgtctaatcgctggctacagaggaggggctgcttcagccccaggtgtacttgaaccgggctgtgttccccttgcagttaggtcctgattcacccattgaaggacaataagggccttgtcccttaatggagggcccttgatcaaatctaagaggtgctggaatgttggagaaggtccccgccttggtctaaggtccccatcccagatcctgtcactgaggggctctcacccccgtcccacccctgccccagcaggcaggagcctcctgggaggtaggaagcagcagccttgtgggagcagaccctccagaccctcaaagaccaccccaggcatgtggcttcagcacccatgcccagcatccacttccggcctggggccccgaaacatagggattcctggaagagttgtctggtcctaggtcattccctcccatcgtcttctagaaacagcttcaggggtagatgctgcatccaccctaccaagccagcctaggcagaatgcagaaggtgcctgctgcacacagcttcttctcccaggctccgcctccacagactccttcaggatccccaggtttatgtcttccccgcccctcagtctccacatggaccacaagcaggctgtgtcgtggaaaaaccagggcttgggagtcagaaagacctgaattcaaattctggctgtgttacttcccaactatgtaagcttgggcaactttctcaccttctctgagcctcaatatctttatcagtaaagtggggataataa

SEQ ID NO: 311 - DNA, 3593 bp, Homo sapiens
tagcatggtcatggctaaagattttattccaagcaagccaggctggtcacgacccaggatctcaggcatcaggctctgctctgaactaaaagtctcatgctctgaactcaaagtagcagtctctctttttccgctcctgtggagagaccctcttccctgatgggaaggtctggtaggtcttcaggttctcgggggctagtcttaaaaggtgccacttcttctttgggcacagaggaggcctaggggtgaggatgggactggtgttatgcagtgtgccagggaaggaaggtggtgcgtgcccacccacagccccacgtgcccactttccagctcaagctgacctgccggctactcgtcagtttaacacctgataagtccccctggacttggggtgggaataacctgtatttacataatggcacagtggttaagagtgaggacacagatgtcagacagacctgggacggactctggtcctaactcctgctagaagtgtgcatatttaagaatggcccagtggtggtatccccctcttagctttgacttgaggaataaatgcagtaatgcatgtgaagctctggacaaggagtaaacacacaacaaatgttctaagaaatggtgatggtgctgatggaggggattccgggagggaggggcttgccccaggcctgtcactgaccctcttctcccaaccacctggttggccctttgcgttcgttgtgaaactgtcagcagcagtgcaagtggccaggcaacctgaagaaggaacagagttgagatgtcccgctctccccacagtgatggggatggggggtagatcctggccagagccatctcaagaggatacctgtccccaggagagtcccactatactctagggatggactggctcagagccattccaagattagagagagcccccgagtcctagaggtggtgatgggagatgctgcttcctttccaagctctgcctccaaccatccaggccacgcagcacaagttccccaggcgatcaatgagcctcacgttcccttttttgtaaaatgatcctgtctgacttgcaaaaaggaacttttagatgcagtgaagcctgtttctttaaaaaccattaaacttatgaaaacagatgctgttttatcagtaaggatgatggtgaatcttaggactctgaggcaagccgggagtggttggcatggagctaaatcccaagctctatccactgacctcccaggccaggcaccacccaccaccctaccccactccaggacacctcgtgtgagccaatgatccccctgcctgcgcttcaggaaggagagagcacagaaaccacagtacccaagtcatctttcagggcagagtgggccttccctggagaaaggagctctcctagataaaagcagagaggggcaggaggcaaggaactttcctatttagttagatggacagaaagtccttaggagaacattttccaaatgtgaacgggaccgggggagattcctgctcggtgtagtgccctctgtatccaccagagggcagcagctccttactgcgctctgcatcggcgcccacgttaggactagtgtagctgccaggctgcctttgcaggcggggcatcagtccgcagattcaggcccactaagcttacggagcttctcccaaactcccagtgcatctggccgggaaagcactcttcctgattcgcccattcaggctaccaccatcccccctgaggctgccaatgccctgacccccttgctctgtaaccatcactctctgcactgcacgttttagggcaagatcctcaactcatttctcagtctgtgtgctgtgcatgcctggccgagagcaggtgccccatgggtgcgtttcttgactgcgtagatgaagggagggcaggcactcacaggacggtggggagggggtaccgttccggctccctcacgggcatcgcaaagtaggggactcgaggcactgtgcctgtcttgtcttgatagtacttccgatgctgctggaccatctatggttcaatcaaggaagagatgacaggttgttagtgcacaggactgaccacaggcacctgcagtccatgcctcgctgcacctgggcagggttgggggccacctcccctaatgcccccggagagtcccggagttgctggggccccaactcaattgccaaccagctgggtgtcctcactgagtcacgacttctcatctgcctaatgggaataacgacacccaccagaccagctttgctatggagagtaaacaagacaagggacaagctcagactgagtacaaaaacccagccccgcagcgtacgcacacctgctgtgcacacaggcaccatgtccgcctggcctgtgtttcctcccccctctccttccccactgtacggggcatgttctgttgagcgccaagatggagggagaggctttggcagaccccctgagatggtcgcacatggctcagaggctggtggcatcaacctcctcctctcccgaggaagctgctttactcatacaagttctctgccctggggccaggacacaccttgtccttgcaatcaggctagagggggaggcttgtgagagaaggtgatggagagagtaaggttttgggaacacaggagagaatgaacccttatccctgccaagggcataagggccagctcaggcccgtgcacctgtggtctctggggatgtgtctgaaccacatccagggaggctttaccagcctgaacagcaggacaagaacaacaggggtgtgggtgggtccccttcctcgagctcactccctgcaggcagtctcgcccaggctggggctgagagtgactcagagcatgcccccagggggctgcagggcagggaggggtgagcaggctccaggacacaggtggataaatgccgtggggctggaactggggctgggggctgtagtggggcctttgctcgtgtgttattcatctggtgggtggatcttagaccttatactcacctacaaaatatatggcattccacagatccaagagactccagggggcagaaggtaagggcaggagcctagagacaggtccctagagacccctagctccactggcagtgggagtgagcaggagttgggggtcctgaagccccgggaggtggggagagatcagaggggcaaagtcctgagcctccttactccctttagccaagcccaccatgctctctgctggctcaggggctctgagaaaggaaatcaagacactgtggcaggtgcgaggtctcccccttgcccctggccatcactcccttcccgtggtgggggcaggtgggcaggaggggaggccacagggcagccccacacagcttacctggtagaaattcgtaagctctgtggagcgatggctgtccaggttgaagcgagtgtagctgggcttgtgcagccagcggtcccgggtgctggcgcgctccatcagcaggaggttggggttggtggagaagatggtggggaaatggccgccttggctgaagggagtgtggctcttctccatggctctgttgcggtggtcctggaagtacttgagggtggtggtgccgtagggagcgccaa

SEQ ID NO: 312 - DNA, 4673 bp, Homo sapiens
  SITE (2230): n equals a,t,g, or c
ttttattaagggccaagcactgttgaaagtgctcccatatgtattatgtaattatcataacagtgtcattatcccttctttaaagatgaggaaactgagacacaagcagtttaagcaacattccaaaaggttacacggttaagcatatgaacccaaaacttcctaggtaggaacttgtcttggaatgtccccgctatttaaaaaattcaagatcccactgctgggcaagatgttacattccttttggaaagacacttgctcttaacagagttaagcaattaattgtagtactttacaccagaaactttctgagcgtccatttactgtctcattttctttgctagtaaaactgcagaaaatgttatgctttagttcttcactgccagagtaagtagcatagaaagcctctatcaagtcacagttggaaagtaatctaataaaagaagattagtgaatgtggggaagacaaaagcagtcatgtttgagtttaatatctctcaaatttagcattttagctaagatgcccgtttttatttcttgcaggtctgctaaaaggtcagagtaatgcagaatgcgtgccttcatctcagatttgttcatcacaggtggatcccatgtgtcttcagtagacaagtcacctttgtagctagcaccagtgccagctccatgccattgcaccttctttagtcttgattgcccttcccgcatttattggtgtattaaaatgactgaatatgaacattaaggactccatgaacctgggctaatgggagactgtagagaaaatgaaaaaagatccaccagaggacatcttggggagggggagggagctgggggggagggaaaatgactaatgaagctaattaaaagaagcattcaaatctgctttctaccctcattaacaattagcagggcactggccagagtttgtaccctgtgttttaccttaacaacattctatttgctctttgtatatttaagtgttgtaaggaaacgtgtttcaatcaaaactgaccatgagataaaggaaagagatgtggcttttgtgatattctatcacaaacacttattgtatctctgtaaaatacaatgtatgtatgcatgtaagtgtttttgtcctaatgttgctactcccatggcaaagaaaaaaaaaagaatgaaaaaaagaaaaaaatttggaaaaaaaaatcaggctcatagcagctactgtgtagaaaattccccctacttctaatttgctgaatgaagaaaaaaaaaaatcttttatttgtgatattttcagagacatttgctctagtatggtgtatttaaataataaaaacttaaaagaaaaaatatttaatggtgtttgggtttaaacactgctttttctcttctgtattttgaagaaatttagtttttattgttgttgaataacaagctcactttaaatttgaaggagttgagggaggtggagtgtatatttatttagctctgggccagtaaggtattcttcaaattacttaaccacgccattattggcaggggtacaaagtagtttctaacagggtcctttctataagtcaagaatattctgttaacagcatttcgttacacttctatatcacagtaagtcttttgtgtttataaatacttgagtgtccactattttgtttattctttttctcaatagcaaacaaagccttgggtattgatgaaaagtatgtataaaaaaaaatacggcacaaccatcctgttctcttattgagtttatagcttttgaaggaagtcacaatttctaagtcatacctgtacatattttgaagctcacttagttgtagggacccagagctctttttttatggtgatctttgattggtgaagtagccatttcctggtgacccttaggctcgtgtggttggctgtaaggtgtttattttgttttgctcctacacttctttactgactgcgtttccgtatgtattttgggggaagattctgacttcatttagtcttagtcttgagatactgagttgctggttgcaggcagcagagtgtccaccacagtgcctgcactgcccgcagagctgccctccggaaagcatgcagtataacagctagtgctggaaggaggaaaaccaaataggcctggaggctgaggttgtactgccagcttccttagatgtgagcaaatttcaactacaacttccatcacaggctaataaaacccaggtgtgtgaacgctactatnttaaattttcttttttaagatggcattttattttgttccagaaaagcgcctgatgtagacccttccttgagaatagccgtgagcatgtagagaggtgtagctcagcacatctcaactacagtcagcttcctttgagaacttctggctcacttcctgttcagagattccagggcagggaaaaaaaaaaatcagttgaacttcaaacctcctagaggagattgtaaaggcatagagttgaggtgaatagttttgttagaaccttataaaaataaaatgcaagaaaataatatgaagaaatcacatatatatgtttgaattagatgtctgtttgaattagatccttggggaatttcttcaaactagttctggttcttatatttgttttttttcctttaaggaactttctgaaggaagttagactgcgatggtaaagggggaaatgggttaatgagattgcaggcattttctatattctttttggcataagcacttatgtccctgatatgtacaaattcaaaggaggtggttaataactttagtaaataatatattgtcgcatttaatgatgtggagggctaaggtcattacggactttaaataaactattatatggctggttcctcaagcactgctgcgtatttaataatgagcttctaaaagcatttcttaagttgcagacctataagattacaaatgtcactcatgttagtataatccacatgcaagtgatgaagccttctctttgatgtgctaaattggagaaggactaatggagctatgaatatacaatagaacatatttaagtagtagtcttgctttaggtaaaacactttcttgaaaccagaggcatttcaaacaataaaacccggctctaatggggatgctctgtgtggatagaaagctactaaaaacactcaggtttattctgatgtgagcagcgattgtgtgcagttcctcccccaatctcaacattgcttaggaaaaaaaaaaatctatgagtttattccacctttcatccattgcatttgtgatgttattagttagcaagatggacactgttctttagaaaggacttatttaatattaaccacgtcatagagcaagatggcccccagtccctacaagcaagtgcaattaaaaataaaagcaaatgttactgagccctgctgaactcctgataaaaaaaattatgtttatggtacatataaatgtctcaatcatgcaaattgtcactcttgttaatgaaacaattttgtaaaaagatagtcctctaaaagggtttaatgttttttacctatctaactgtctaattagatttacacatcccgcaaggcaggggagcctgaagcttttccaaaccaaatcgtttgccactagaaactattttcagctcttcatgatttattaggaaatagtttaacccggactgtagtgtcttataaaatacaaaacgagaaaactgacacaccaaaatgaagtctgtgaaattgtcatcctcttaatattacctgtatttaaattctttcttttgcccttattaacactgatatttgaaacaactaatcatctaaaaggaagctcttaaagggctttaaatgtcaatatagtaagattctaatgtgcactactatttatataaaatatttcttagggcccataaatcatataataaacagtgaacccaagagctacatatggagtctagtgaagagttcccatgtagcctaactaattgtatttaaattgaggagatccaaaaaccccatcacccttcaccccaaagaccccttcacccttcaccagggaattctatcctgggtgctgtcccacctatgaccccttcaagaggccattggaaaaaggccatttacaagttaatgttacttatagctttgttactaagactcacctattgttagtgcagccaagtcacagaagtgcttattgcagttaaatagcaatttgtttccatgaaactgcaattaaagtattactgagcagccattttagattggcagtgctctgaacgcatgttaaacagccagctactcccacttgcagagtctgagatctgactagcagcaaagtgtagcacattcgccgatgctgggtacctagttaaagaggcatttgtagccctctgctcccatcgtgaacatgctgagagcaatgacaagtcagggctgatttttggaaggtgaacttgcaacttacctcaagtgaatactgttttcagttgtgcaagaagtgctttatgctagtagatatgtgcatgtttcctagagggaatgttttcaagttcagattgattctgctgagaatggacggcaactcggaggcctcaagccaataatgtactacaggccctgacatgttacagctgtgtaaacagggccattctatttcctaaatcacaactaataaagcagaggatgaaaatcaa

SEQ ID NO: 313 - DNA, 2139 bp, Homo sapiens
tatatgtttgaattagatgtctgtttgaattagatccttggggaatttcttcaaactagttctggttcttatatttgttttttttcctttaaggaactttctgaaggaagttagactgcgatggtaaagggggaaatgggttaatgagattgcaggcattttctatattctttttggcataagcacttatgtccctgatatgtacaaattcaaaggaggtggttaataactttagtaaataatatattgtcgcatttaatgatgtggagggctaaggtcattacggactttaaataaactattatatggctggttcctcaagcactgctgcgtatttaataatgagcttctaaaagcatttcttaagttgcagacctataagattacaaatgtcactcatgttagtataatccacatgcaagtgatgaagccttctctttgatgtgctaaattggagaaggactaatggagctatgaatatacaatagaacatatttaagtagtagtcttgctttaggtaaaacactttcttgaaaccagaggcatttcaaacaataaaacccggctctaatggggatgctctgtgtggatagaaagctactaaaaacactcaggtttattctgatgtgagcagcgattgtgtgcagttcctcccccaatctcaacattgcttaggaaaaaaaaaaatctatgagtttattccacctttcatccattgcatttgtgatgttattagttagcaagatggacactgttctttagaaaggacttatttaatattaaccacgtcatagagcaagatggcccccagtccctacaagcaagtgcaattaaaaataaaagcaaatgttactgagccctgctgaactcctgataaaaaaaattatgtttatggtacatataaatgtctcaatcatgcaaattgtcactcttgttaatgaaacaattttgtaaaaagatagtcctctaaaagggtttaatgttttttacctatctaactgtctaattagatttacacatcccgcaaggcaggggagcctgaagcttttccaaaccaaatcgtttgccactagaaactattttcagctcttcatgatttattaggaaatagtttaacccggactgtagtgtcttataaaatacaaaacgagaaaactgacacaccaaaatgaagtctgtgaaattgtcatcctcttaatattacctgtatttaaattctttcttttgcccttattaacactgatatttgaaacaactaatcatctaaaaggaagctcttaaagggctttaaatgtcaatatagtaagattctaatgtgcactactatttatataaaatatttcttagggcccataaatcatataataaacagtgaacccaagagctacatatggagtctagtgaagagttcccatgtagcctaactaattgtatttaaattgaggagatccaaaaaccccatcacccttcaccccaaagaccccttcacccttcaccagggaattctatcctgggtgctgtcccacctatgaccccttcaagaggccattggaaaaaggccatttacaagttaatgttacttatagctttgttactaagactcacctattgttagtgcagccaagtcacagaagtgcttattgcagttaaatagcaatttgtttccatgaaactgcaattaaagtattactgagcagccattttagattggcagtgctctgaacgcatgttaaacagccagctactcccacttgcagagtctgagatctgactagcagcaaagtgtagcacattcgccgatgctgggtacctagttaaagaggcatttgtagccctctgctcccatcgtgaacatgctgagagcaatgacaagtcagggctgatttttggaaggtgaacttgcaacttacctcaagtgaatactgttttcagttgtgcaagaagtgctttatgctagtagatatgtgcatgtttcctagagggaatgttttcaagttcagattgattctgctgagaatggacggcaactcggaggcctcaagccaataatgtactacaggccctgacatgttacagctgtgtaaacagggccattctatttcctaaatcacaactaataaagcagaggatgaaaatcaa

SEQ ID NO: 314 - DNA, 3694 bp, Homo sapiens
agaaaatggagatggaaagggaagatctaaatcagaaggcttgggatattcagatgctatttttttcaagagatcgtcaaaaggtaaattctccctacccccctacatagttttaattttattcattaatgtattcattcatttaaccagtatttaataagaagcctctgtgatatcaagcatattctaagccaggagtgtttcaaaatatatctgtgagttatttttcttccaacagtttacatttgcagcctccagttcttcatgacccatttagtagaatcattctactcagagctaaggatttcctgtcaaacccggtggtccttcaattctctgtagcatttaaccatcttaatttctcattcctttggctttcatcaccccaaattaattttgcttccaacatgtcataccactctacctcttttactggattctcttttgcctctaacacttcaatatagccgttcttcaagattttgcccttagctatgtttgtgtttctttccatacctctccctgggtgatgtcctctgtttttctaacttcaacgatcactcctacaaactaatccaagttctgtggattccaagccatgccccatttctatagttttcacctcccagcagctcttcttagtttgccttttttgtacatcccaaatctacttttcaagggtctagtttaaataccaccttctccttcataaaacctttcttgattttccaagcctggagaaattccatctcattacaaaccacctttgaattagcatgacactctacatggcttctggcaaccaatcatatctatgtgatcattttcccatgaagactaggacatgttatctatctttgtatctccctcagtgtctttaactaggactttgttaatgtgggactcaagtggaacaacacttaaatgtttggtgagttgaataaatgaattaatgaatgagaaaataaagtaggcatttgtaataattggtgctttgatgtaataattagtgtacatgaatgtattgatggctaaatacagggaaatattatggcacaaaagccaaatcaatctttttttgttttttttgagatggggttttgctctttttgcccaggtggagtgcaatggtgtgatatccgctcactacaacctccacctcctgggttcaagcaattctcctgcctcaccctcccggagcagctgggattacaggcatgtgccaccacgcccaactaattttttgtattttttagtagagacaaggttttaccatgttagtcaggctggtcttgaactcctgacctcaggtgatccacctgcctcagcctcccaaagtgctgggattacaagcgtatgccaccacgcctggccaagccaaatcaatcttaacttgcatagatatttgttatgaaaaacagtaactttcaaagctaaaacaacctttataaagtcatctattgaaagagagaaaaatatccttacatgtttttttttaatctcaaagtacctaaatgaaccaaactatgaggctctgattagtattcagattggaataatggaacaaaccattgctgttttagataaggtaagtctcaaagacgttggttattatatcctaacagttgtaaatcatttgagcaaagtaatagtgtttcaaatcatgaatttacctagaccctaataaaatcttggttatttactagtattcatgaggtaattaaaagtccctaagtagtatctttgcaaccgcaactaatgaaataaaattaagcacttccaaaaaatattagaattaacccctggggacatatctgagtgtaagtggattttctattttacattaggttaggatttatgtaataggagtgttggtagtctttccttggcattggaaaggttttatttaatcatcactgaataaaaatggtcagtttttattatgtagcatatattagaaacaaagcaatctcaagcttttaaaatattctctcagtttaagaatatacaaaatgttttttctaaaatttgttattaacataccattctacctttcaacaaataactcgagtgcctactatgccaggcactacagatatggcggtaagatgttatcttaatgatgataatgtatttaaaatataagaataatgtctttataggataaattacatttttcaaaattaattttgtggggtgtcatgggaacaaaaatttcagatgcacaaaaagaatgtggaaaactgcaagaaactactcaaaaaacttggaaagttcagcaatcaaaaagatatagcaaattatgccctaagctgcaatctacgagaagagttggtagctgtctcagagagaaaagacatctgtaatgcaatgggtaagcatgcttttttttctttaaccaactgtaggtttctttaaaagtaatcagtaatcctaaaatgtatacaacagttaaaaagctatcagcatttctttaaaaatacattgtttaaaataatttcaacttttattttagattcagggagtacatgtacaagtttgttacttaggtatattgtgtgatgctgaggtttggggtacggaatgattccgtcacacaggtactgagcatagtaccccataatttttcagcccttcctccctccctgcctcctccctctagtagtccccagtgtttcttttctttttttttttttttttttttttgagacagggtgtccctctgttgcccaagctgcagtgcagtggtatgatcttggctcaatgcaacctccacctcctgggctcaattgatcctcccacctcagccccctcaagtgcctgggaccacaggcaggaaccaccatgcccggctaatttttgtatgttttgtagagagtaggttttgccatgttggccaggctggcctcgaactcctgagctcaagagatccgcccacctcagctaaccaaagtgctgggattacaggtgtgagccaccacacctggcctccaagtgttccctgttaccatctttatgtccatgagtatccactgtttagctcccatttataagtgagaacatgtggtatttggttttctgttcctgtgttaatttgcttaggataatggcttccagctacatccatgttgctgcaaaggacattatttcattcttttttttatggctgtgtagtgtcccatggtgtatatgtaccacattttctttatccagtccactgttgatggggcacctagggtgactccatgtctttgcttttgtgatagtgctgctgtaaacatacaagtgcatatgcctttttgctaccagcatttcttccacatgtatgattctgagtgctgcttctgtatttgaaagtattgataaataatcgaattcctttattcatttttgggatagggtctaaactgacttgtgaaaagattgtcaaagaacggtatgaaaacatgatgcaacagcagaagttaacaaatatttcaaaacaacaagctgaacagatttcaatactacagactgaagttgaaagattaagaatgaaaacatttcctgctcttgttcaaatgtaaaaacgctggcaggaaaacacaaggccaaatcaatcatttaaaaaatcatttcatttgggtaaaatgatttccttttctttcttactgggaaattgaagtagcatgtcctctgagttgcatgttataga

SEQ ID NO: 315 - DNA, 1453 bp, Homo sapiens
actactcaccgttcgagggcactgagctagagcaggttcggcagctggaccagcagtacacgatcctccgctcgcccctgatatacggtggcgtggctgtttctctgggtctgggggtcctcaccatgggtgttttactccaaggagccaagagtcgaacaatgttgtcagggaagtggctcctcacggaggccgccttcagcctcctagcggcagtgggctactgcacaggcattggtgtttacctccacgtggctctgcagatcaatagcaccgacacttgcaaaacaagagagaggctctatgcccgcaagggtctcacctggatggactgccagctggcaggcaccgacggagcagcagccacctttgcttgtcttctcgtgatcatgtacggcgccagcgtggtgctggccctgcgtagctaccgagaacagaagcgctacaaaggcagccgagaacagcccggaagttacagtgatgcaccggaatatctgtggtctggaactctttgagatcttccggaacctaaatgtgaacgcacattgtttctctcaaaaagacaggtcttttaaaactccgcattagacaactatggttttcacacacttgactttataaatgctctctttggactgaggcaaagttaaagaattgaggacgggcatggtggctcatgcctgtaatcccagcactttgggaggctgaggtgggcggatcgcttgaggtcagcagattgagtccagcctggctcacatagcgaaaccctgtctctactaaaaatacaaaaaatcgccgggcatggtggctcacgcctgtaatcccagcactttaggaggccaaggcaggcagatcacctgaggtcaggtgtttgaaaccagtctggcaaacatggtgaaaccccatctctactaaaaatacaaaaattagctgggcgtggtggcaggcacctgtaattccagctactctggaggctgaggcaggagaatctcttaaacccgggaggcagaggttgcagtgagccaagaccattgcactccagcctgggcaacaagagcgagactccgtctcaaaaaaatacaaaaaatcatctgggcttggtggtgaacgcctgtaatcccagttactcaggaggctaaaccacaagaatcacttgaacctgggaggcagaggttgcagtgagcaaactccactccacgtcactgcactccagcctgggtaacagagcgaggctctgtctcaaaaacaacaactacaacaaaaaagataggacagtagattttattagaccctgaagcatactggaggctttttcatttctgcattccctgacagtgctccatagagtaggtcttcaaaggtagatagtaatctcattaccctggactgttctcataatgtaacagatcactaacactgaatcttaaaaataaagttcttttagtaattttaa

SEQ ID NO: 316 - DNA, 190 bp, Homo sapiens
gttgtggtgtcttggccgggcacggtggctcacacatgtaatcccagcactttgggaggccaaggcaggtggatcaccaggtcaagagttcaagaccagcctggccaaaatggtgaaaccctgtctctacaaaaaatacaaaaaaaattagccggcctggtggcaggcacctgtaatcccagctgcgtgg

SEQ ID NO: 317 - DNA, 462 bp, Homo sapiens
acatggtacacttacttttgtggaaaaatgcagggaagggaatgaaatgcagatttaaatgtgctttttatttgcataaaggaacactggacaattatattgaaaccaatgaaagcggttggcaacattgaagagacggtatgagtgaaatttctcagtttatatcttatgtcatttcaattttttagaaacttttcgttttgaaatatagatttgcaagaagtcacaaaaacagtgcagagtactcctgtgtatccttaacccagttttctccaatgataatatactgcataactagtacaatatcaagaccaggaaagtcacaatctacagagctcatttaggtttcccccttttacctgcacacatatgtatgtgtttgtagttctaagccgttttatctcatgtgtagatttgtgtgagcagcaccatgatgcaatccagaactgttccctcaccctg

SEQ ID NO: 318 - DNA, 5306 bp, Homo sapiens
cgtgttggctagttgatcaccttaaatgtgtgctcaatccctcttcactcagaacatgaacctgaaaagccataaacataaaacatgaacataaaaccataagatagattcttcctcaggaatgaagttgcctgcattggggtcaggagggaccagcactccttataggagaggacaatgaggcacttggaccacttccttggtgcacttggtggatgcccccaccccagcctgcatgtgtgcaggaggccagacaagcacccccagtagacagggcaagcccccaagcacaatcccttggcagcagtgtctgtcatcctgacgctgggtgggctgtgtgggacccagtggctccaagggccctgtctcatctggaccactctggacttgcatactgtgtccccctcattgttctctttatcacctgctcctcactaccctcctcatgtcaatggcaggtcatgattccacccaccaagcagacgacatgtccataatcctccctacttagcagccaaactcatctgggacatctctgctacccttccctcaccttctggtcactccagcccctgatgacagcaggactacagaacatgcagggacaccccattacaacccagtgggattgggcctcttgcttcttggcacacagagatgccaggcttagggccaaggaccgtgaaagatgctactcttgtttgtgggctccaggaaagagcagagctcaggagcacaggagctcagagctgcaggcacatctagccaaacatggtacatgctgtcatgaactcgtggaggcaagtgttgagcaaggctctgcaaaacctccaagtcacccaacctcgtttggcttgtcaaggttcaggcagggcccttgccacagtctgggggcccattccaagtaaatctctctctccttctcccctgttcttgggaatgacatcatcttttccagaggccctgcagaccaggcttcagtttcccaccccacttaggcttcctggaacccacactccttgcatttcttggtcttgctctcctgcattgccctcctcatggagttgggagggaatgagtttggccatcctgaaatcttctgttctctacagagagtgcaaatcaaggacagtcagtggtcagggcatgtgattcagcctgtgttctaggatgtcattctggacctagggtcagctggcctggtccaaaaatcaaaaatacctttggcaccacatgagatctccaccctctatgcagtctggacccagctgtcttctgcagcccccagccgtgtaagagttgtgtgtctgcacagcacctggccccaggagcttctggaagttcctggccatggcctgctcggcatctgccagaggcagttcattctctctctacaggcgtcccatggacactggagaccctctaaaatggccacgtttcttagatggcctgaactgtaacctcagcagccagtttttactgctcacttaaatgtgctcaccatagcagaaaagcattatgtccaagtctggttcagcccctggcaagcgtcaggcagttggatttcatttgggacttttcatttcccctttcttcttttaacccctctccccatcctctttggggaaaaaaaaaacccaagagacgatctgatgatgatactcttccatacgacagtacaatgactaacgtggatttgtgtgtcgcctctcctggggatcgctgtactttagtggagacaaaagcctcgccttggctaacaatcgattttggcctctctgggagggaacattcttgtccagccagaagtcctctgcttggtgaacaggaagtgatggaatttaggagaccacaaaatcatctttcttcctgacactgactccaagggtccttgcttggttcctgctttcaatcccatattccaagggccccccatttctgcctgctggtgtccacactctaacagagacacccaagatcccagaggcttggtatcccatggagcatcacaggatagaagctcctggcccagctagaagatgcttgaactgcttcaacttggaacatactttttaagcagcagctgagaaaattctgtggcttcccaggccatagagctccttcctggagacagcatgacaacccaaagaggagcatccatacacagcaagcacggggatgtggaggaagttaaaaacgtgcccagcccagagccacaaattggttccagaatatcttctgcacattttcacagcctcagagtacggtgacacttcatctagaactgcatggccactgggacctcctgatcaagcttctgtgtcttccacaattctagagtatctgagctagtattgccttagggaacacctggacttaccctcccattttccagatggggacactgaggcccataaaggcaagaggagtggtgatttgccagtcggcatgccagggataggtgacagaggctggggaggccctaggtttcctgactcagcccccgcctctgacctcaagccgtatcaggtcattcctctgcaggtggatggagaagaaaaggaaggagggtgctgctctggaaaggggcaagtgcaggagggaagctgagactctggaacggaggtgggccagggcatccagcctttgccagtcatcggacagcagacatctcaagtgaaagcagaatcatctgccttgactccgtgtggtgtgtgctattctgctgcatgtctctttcaccagatccagaatacagctgtgctctgaacaggattagtccacaccaggtggcgaggctttttctacttgttgataaggcatggaactgaatggtacgctcagcccttctttccccttgaagagcacacacagatctcttcctgtcagaatggagacttagattgtccttctcagtagacaaatttctcagcagaaatctgaccccaagattgggcgtgtgcttggcctccggggcctgtgtcccctccaggctgactagggctctggtggcgtgacgtaccgctgtgctcccgcggtttctcagccacattctgaatcttgaggaacagagctgcaaaggaagtctctaacctatctcaccattttatcaatgagggagctgaggacccctgagggaaagggccttccctcgggctacacagggaaaggtgcacaaagccaggcttgacccggggtgctccatgggtcagacaaactccagccaccgaaactctgctccagcctgatgtgtgcgctgggcctggcgaggtcgcttggcaaagccctttgctgtggagcttcctcttctccagccaggccttttcttttctgatgatcagttcgtctcccatcttttttcttgatccttaaatttgggtggcatttctggtgtgaaaaggggaacgtgtgaaatgacggtcacatcctttgggtctagttcatgagaaagatcaggaaaatgaaaaatctgccatttcctgctctgagcgcaggctcctgggagtcacccactaagtccttctaaactgcccaggtctcgggatcctgcagcatttccaagggccaaatccacactcaggtccctcacacccacttccttgcttctgagagatgtgggagcacaggcacactcaacaaggacccgtgcccaactcctgaggagttcaggggcaaggtgcccaaacacaggaggcccccagatcccaagggaaggcaattctggagccctgttgggcagcatgttggagtgtgggcctgatccccgggcctcggggatcacagcgtgtgctgtgtgttagtaaatgcttctgcttccttctagactaaagctttgattgataagctccaaaagcttgtgtcatctgagggcagatttaagaatctcagagaagctctgaaaaagtaagtgtgtgtcgttttgtcgctgttatttttaaaatcatagacctgcattgcagaggcattcacgtgccgcccccagccagagcaggaggtctttctgtctgtctgttcgtctgtctacccacaagacccctagatttcctggaccccaatggtggagtcctccatggtctgccagagaaactccagagtttgctagcatttcctgagagaagcacaggaatactgctgggatccctgaaagcatagtagctgtgatgataatagtagtggtgccagatttctcgattctaaaatgcacgttttcttttcacattttaataattctgacatcaggagacgtcttaacgtcagttttgtttatttaacacaattgtgtttcctttttcactccagaattcatcatcaaaatgtttgcattttataaacaatggcatccgggaattaaaaaaatacagttttacaataatcatacttaaagtttgtaaagcacttgcctagacattgtgcgcttaacgccatcaacattgcccacacggcggggtcctcagcctcagcacccttgctgttttgaccaggatgatcctttgttgagggggactgtcctgtgcattgtagaatctttagcagcatctctggcctctacctgtgagatgctaatggcacccctccaagttgtgacgaccaaaactgtctccagacattgccaaatgtccactagggggcaaaatcctccccacttgacaaccatcaggataaggctgcttcccgcatcctgttcttccagacaaagaaactgaagagctagtgtctggtccaaggccacgtggacggtccaaggccacatggccgtggcctagcaccaggactggcccaggctggcctccagagcttgtcaaggtttgccctgggctccagacgagctctcccagggaagcagtgattcagcccatctgcacacactgtggccacacactcacatgaagtggggggtttgcttctgtcactctcattaggtgcttactcaggcttctgcactagtctcaaccctcctttccttgagtgagtgttccttcctctcctcgcctgactggctactcgccagaccttggagagaccctgggagatccctggggtcccggttccctatatagctcaggaagcctctccccgcttcctggtgttcccatgatcacggctgacgcagggaacaccagagtttactacccccagaccctgaggatggggccagccaaaacctccagcccttgacagtggctttgacagactgctcacccctctgccagcctcgtctgcctcctctttgcgttttcttcctgccgcatttggtctgtcctttgccagctctgtgtgccatcgccttgaccatctccactttgttt

SEQ ID NO: 319 - DNA, 1527 bp, Homo sapiens
cttgaagagcacacacagatctcttcctgtcagaatggagacttagattgtccttctcagtagacaaatttctcagcagaaatctgaccccaagattgggcgtgtgcttggcctccggggcctgtgtcccctccaggctgactagggctctggtggcgtgacgtaccgctgtgctcccgcggtttctcagccacattctgaatcttgaggaacagagctgcaaaggaagtctctaacctatctcaccattttatcaatgagggagctgaggacccctgagggaaagggccttccctcgggctacacagggaaaggtgcacaaagccaggcttgacccggggtgctccatgggtcagacaaactccagccaccgaaactctgctccagcctgatgtgtgcgctgggcctggcgaggtcgcttggcaaagccctttgctgtggagcttcctcttctccagccaggccttttcttttctgatgatcagttcgtctcccatcttttttcttgatccttaaatttgggtggcatttctggtgtgaaaaggggaacgtgtgaaatgacggtcacatcctttgggtctagttcatgagaaagatcaggaaaatgaaaaatctgccatttcctgctctgagcgcaggctcctgggagtcacccactaagtccttctaaactgcccaggtctcgggatcctgcagcatttccaagggccaaatccacactcaggtccctcacacccacttccttgcttctgagagatgtgggagcacaggcacactcaacaaggacccgtgcccaactcctgaggagttcaggggcaaggtgcccaaacacaggaggcccccagatcccaagggaaggcaattctggagccctgttgggcagcatgttggagtgtgggcctgatccccgggcctcggggatcacagcgtgtgctgtgtgttagtaaatgcttctgcttccttctagactaaagctttgattgataagctccaaaagcttgtgtcatctgagggcagatttaagaatctcagagaagctctgaaaaagtaagtgtgtgtcgttttgtcgctgttatttttaaaatcatagacctgcattgcagaggcattcacgtgccgcccccagccagagcaggaggtctttctgtctgtctgttcgtctgtctacccacaagacccctagatttcctggaccccaatggtggagtcctccatggtctgccagagaaactccagagtttgctagcatttcctgagagaagcacaggaatactgctgggatccctgaaagcatagtagctgtgatgataatagtagtggtgccagatttctcgattctaaaatgcacgttttcttttcacattttaataattctgacatcaggagacgtcttaacgtcagttttgtttatttaacacaattgtgtttcctttttcactccagaattcatcatcaaaatgtttgcattttataaacaatggcatccgggaattaaaaaaatacagttttacaataatcatacttaaa

SEQ ID NO: 320 - DNA, 393 bp, Homo sapiens
ggcctcaccatgttggtctgcagcccattcatacgtcccaggcatctttttttagcttttcattaagatatccaattcgggctaggcacagtggctcatgcctataatcccagcactttaggaggccgaggtgggcagatcacttgaggtcaggagctagaaaccaaccttgccaacatggcaaaaccctgtctctactgaaaatacaaaaattagccaggcgtggtggcacatgcctataatcccagctacttgggaggctgaagcacgagaatcgcttgagcccaggaggcagaagttgcagcgagctgagatcgtgccactgcactccagtctaggtgacagaacaagactgtctcaaaaaaaaaaaaaaaaaaaaaaaacaaaagaaaa

SEQ ID NO: 321 - DNA, 393 bp, Homo sapiens
ggcctcaccatgttggtctgcagcccattcatacgtcccaggcatctttttttagcttttcattaagatatccaattcgggctaggcacagtggctcatgcctataatcccagcactttaggaggccgaggtgggcagatcacttgaggtcaggagctagaaaccaaccttgccaacatggcaaaaccctgtctctactgaaaatacaaaaattagccaggcgtggtggcacatgcctataatcccagctacttgggaggctgaagcacgagaatcgcttgagcccaggaggcaaaagttgcagcgagctgagatcgtgccactgcactccagtctaggtgacagaacaagactgtttcaaaaaaaaaaaaaaaaaaaaaaaacaaaagaaaa

SEQ ID NO: 322 - DNA, 1570 bp, Homo sapiens
gattttttggtctgttttggctgctataagataatgctatagactcagtgacttataaacaacagaagtttatttctctcagttctggagggtgggaagtccaaggcactggcaaattcgatgtctggtaagggcctgctttgtggttcataggtggctgtcttctagctttgtccttatgtggtagaaggggtgaaggcgtctctggggtttcttatatgaggtcactaatcccatttgtgatggctctgccctcataacttaatcacctcccaaaggccgcactttcaaataccgtctcgtgggcggagggcgtattgggattttaatacatgaattttaggagatggaaacattttagtccataacatacaatgataatactaatttatgtgatttaataaaagcttattctcttaaatcttggaaacaagatttgtattaaattattctcctaattgttttatctattttataaaaaaataaactgcaagtatcagaagacttacagtagttaaattaaagagtagctgggcacggtgaatcatgcctgtaatcccagcactttgggaggcgaggcaggaggatcccttgagcccaggagttgcagaccagcctggacaatataggtagaccctgcttctacagaaaataaaaaaaattagctgggtgtggtggtgcacacctgtggtcctagttgtttgggaggctgaggtgaaagaatcacttgtgcccaggaggttgaggctgcagtgagctgtgatcacactactgcactcctgcctgggtgacagagtaagatcctaactgaaaaagtaatgtaaaaagccaggcatgtgactcatgccttaatctcagtactttgagaggccaaggtgggaagattgcttgaagtcagcagtttgagaccagcctgggcaacatagcgagacccctgtctctacaaaaatacaaataaaacaattagctgggtgtggtggcatgtgcttgtagtcccagctacttgggaggctgaggcaagagaatcactcgagcctaggtgttcaggctgtagtgagctatgatcaagccactgcactccagcctgggcaacagagcaagatcacgtctctaaaaaaaataagcaagtaatatgcagtttcccccctgtggtaacatcttgcaaaactatagtgcaatatcacacccagatattggcctcgatacagtcaagatgcagaacagatccatcatcacaaggaccctcctgttggctttcatagccacaccaactgctccttatcccctagaatccactgatctattctccctttctaattttgttgtttcaataattttgtatgccttcatacagtctttttgggattggcctttttcacttccatggttctctggttgttgagtttatcaatactgtagtttattcctttttgtggttgatacagacttctatactatgatctggatatgccacagttagtttaactgttcacccactgtagaacatctggtttgtttcctgttttcacttttgtgaataaagctgctaataaatattcatgtcgagggg

SEQ ID NO: 323 - DNA, 553 bp, Homo sapiens
ccactgacagcttgcactctgtgtctggaaaagctgcagacacaacactagcccatgaaagcagctgagagggaggctgtaccctgcaaagccacagaggaagagctgcccaagaccatgggaacccacttcttccatcagcgtgacctagatgtgagacatggagtcaaagcagatcattttggagtttcaagatttgactgccctgctggatttcagacttgcatgagacctgtagcccctttgttttggccaatttctcccacttggaatgggtatatttacccaatgcctgtacccccattgtatctaggaagtaactaacttgcttttgattttacaggatcataggcagaaaggacttgccttgtctcaaatgagactttggactgtggacttttgagttaatgctgaaatgagttaagactttgggggactgttgggaaggcacagttggttttgaaatgtgaggacatgagatttgggaaaggctggggcagaatgatatggtttgctgtgttcccacccaaatctcatcttgaattgtagctcc

SEQ ID NO: 324 - DNA, 10785 bp, Homo sapiens
aagacacagaaattgaacctgtccatttggcatcgggatacatttaagcgcaatagtttcttaggggaggtggaacttgatttggaaacatgggactgggataacaaacagaataaacaattgagatggtaccctctgaagcggaaggtgagtccggaattttttgtttgtttatttggttggttgatgtggtacctagtgtataggaaaaagcttaattgcatttaattcagagtacagatctgtagtttgggagaattttaaactagaggaaaaaaaagaaaggtaaaaaaggttattgggaacatgtttaaatcatttaacacaaatgtttcagagacttcaggaaggtcttttaaataattcagtcctttgaaatttgatactgacttttagcctaatatttggctgaattttgataaatgttccatgtgttacttgagaccaaagtgtattcaatgattaaaggatgtaatgttctatatttatcaattaagtcaaaactagttcctgaaatcttttatatcctcatgggttttatgtctgtgtgtactgtgaattactaggagagttacaattgtgaatttgtctttttctccttttagttttattatttttgattcactatatttgagattgtcttattacatatacatacaactgtaattgttatattttcttgatgaattaaccattttatcattttgaaattccctttttatctctagtaatgcttattgccttaaaatctactttgcctgtatttatatagctctattagcttccttttgattagaagtttgtttctatcttttgattttcagccttttaaaattcttatagttcagatatatttttataagcaatagttttgatgtttttccagtcttaaaatatttgtctcttaattggattatctagtccatttgcacttaatataaatattgatgtatttgggtccaaatctagtatcttactatttgtcctgttttcttattttcgtaattgcctcctttgggattattattccattttttctctctcttaatatgtcagtcatagtttattttcatttttctttattagttcctgtagagattataatatgcacccttgaattcaaactgtaatataaattagaacttttgccactttcagaacagtggaaggaaccaagaacattttaactccatttacccattctctcatcctttgtgctatttttggtcatgttttaattgtatatatttttaagtcccataagacattaccgttattgttttatacggtctattaatttagatttaaccacatatttgcctttcccttgctctttatcctttcctggatttatccgtggagttgtttcttctgttcaagactctcctttagttttactcttagtgaatatctcctggcaacagattatttcagattttcttggtatcataacatctttttcaatcttggagggatatttttgctctgttgctaggttgacaattatttctttcagtgttttgaagatgtcatttcatagtatttggtcatttctgttgtgaagtcagctgttagtcttatttttgctcctttgaaggttatgtgttcttttccagattttaggatacttttctttgtctttgatttttagcaattgtactataatgagcctaggtgtagttttctttaatttatcctgaggtttggggttcagtgagctgcttgaatctatctatgttttggtatctttcatcactttgaaaatttctcagcaactatttcttcaaatattacttttgccccactattttctcctctccttctggaaactccaattacaagtatgttatacctttttattctgtccaacatgtctcttatggtcttttctgtatactttttttcttatatttcagtccatgttttgctaaccttttcacaattcaacaattttatctgctatgtctattctgttgttaaaaccatctacaatttaagccaatctataatataaagcttatattttcgaaagcatattttcttttgactattttgattccatttctctcctaaaattctctatcttaacattgtctttaaaaatatagcatgcaaagttatttaatgtatgtacttaaaaattccagtatcttaaacatttgtgagtcctgcttatctattttttaaaatcttagtttggacacttagttctttgtcttggtatgcccgttcattttttgatcatatgtggggtattgcatatgagaacgttctaggaataattggggaggatttacttttgcttctgatacagcaggcacagaccaccttcatttaatctgggaataaactgactttgaagcacaagcccagttttcatgtgatctggtctagtttttgtttgcttatattcctaggctaaggcccttcagaggttccaactgaaagccatgggaaatagttctcaaaatcagcatgcatctgattcacctgaaggacttattaaatcacagattctggggctgggtgcggtggctctcagctttaatcccagcactttgggaggctgaggtgtggattgcttgagtccaggagttggatggagacaagcctgaggaacgtggcaaaaccctgcctttgcaaagaaattaaccaggcttggtggcatgcacctatagccccagctactcaagaggctgaaatgggaggatcacttgaacccaggaggtggtggttgcaatgaactgagatcacgccattgcactccagtgtgggcaacaaagcgagaccctgtctcaaaaaaaaaaaaaaaaatagacccactagattctgagccctattcccaaggtttacgggcccaagaatatacatttttaacaggttccctgtcaatgcagctgacctagaaacggtactttgaaaaccactggtctagagtgtttttccagtgccattccttcttgacaggccgtgggctccaagttttgtctccccagcctcatgaaactgctaaaagtcctgcttaccttttcagtctcattctgttaggctttttatgtgctcagtttggcactacttaaatgtctcaaagtgaaaagcagagaagaatgtcagactctaagatcttgttcatttgagtcctgtctgtgttaataattctttagcactttcaaactgatatttaaaatcccaccttttaaattgttattagtttaggggttgatgtgatccaagctagtccatcatagtaggaagtgataaatataaataactaatacaaaccataacttagtgtctacacaacagtggaactgttttagttccactaaagaaatggttctcaaatgttatatcaaaatcacttgaagcacttatttctagccctacccaagacctgaactcctcagaagatatcaaaagcatctcatttttaactggctaccattacgtttctgatacatacccatattttgaaaataaagctctaaagagccagaatttgaaagtaaaaaactatcttatgcaggtttcttatacaggtttagcatccctaattcaaaaatttcaaatccataatgctccaaaatctgaaactttttgagtgccgatatgatgccgtaagtggaaaattccacacctgcttcatgtgatgggttgcataaagttattaaaaatgttatataaaattaccttcaggctatgtgtagaagatgtatatgaaacataaatgaattttgtgtttagacttgggtcccatccctaagatatctcattacgtatatgcaaatattacgaatttcaaaaaacaaatccgaaatctgaaacatttctgatcccaagcatttcagataaggaatattcaacgtgtacttgaaaataacagatagaagtttaaaaaattattgttcagtctttgttatacttacagacttctatgcatttggcctaaaataatcagattagtgcagctttgaaaatgtaagatatggcctttccccccttactttcacacactatctcatactccttcaaataaagggaatacaaataaattgttttatatgctggctgaatagctaacaaaatatttgtgttttgatcaaaattaaagcattcaaagaaacctctcccatctccaagaaagccattctggtttcttcaccatctttgagactaaaggccttgaaatattttctgggtatcctgcaagatttttcaagatatacaacctagttttcccaggtattaaggcaacagtctagttctgatgcagagagaaattttaatccagagcactcatgagtgacacatggtcccagaaatgggacagatatggttctgtaatgagacctataccaacaaacaggatgaaaagtttgtctcccacctgctgacatttcttcacttttcagacagcaccagttgcccttgaagcagaaaacagaggtgaaatgaaactagctctccagtatgtcccagagccagtccctggtatgtaatgactttctattcagatttatgtcctttccttatccctcccttctcacagtatttactatgcgttttcaaaggtgaggccctaaagaaacttatcaagttagtaacgtatagaccaaatgagtctattcacagttgtaaataagaaaattctttttttgttattgtggcaaaaaaaaaaaaaaagaaaacataaaatctaccatcttcaccatttttaactgtacagcttagtagtgctaagtatattcacactgttgggaaacagatctccagaaccttttcatcttgcaaatctgaacctgtttatctattaaccaacaatttccttttcctctactaccagcttctggtaatcatcattttactttctgtttctataagaaagttctcatttttttttttagtttagtttatagtcattaggtttcacctcactctccaaaaatttgtatctgcacaatgtgaatggcctgtattcagaatttgtgtattcctgtgtttggaatttggacttattgatagtgctataagaatagaacctgagtgttctttttcacaggtgggaattaagaggactccagagaacttaaagctcattcaccctccactctcagggtctcattaagagataaagcttttccctcaagattattaattgcctccttgtcaggtcttcagcccagttaaggagcaagagactagcaggaaatgaatgccagccagctccttgctccatttcccaagcaagttccccaagttagtctctttaagaatctgtatgaatgttatggctgaaatcagaggttgtaaactcaaatgctttcagtaaccaggcagtgaagctagtgagatggaagaaataattgatggtgaggatagtgactgaactaaagaaaagcattctgatgtagtttataccgccccccgccccccaaaaaagaaagaattagagggcaagtaaagcatattttcaggctggattgctgtcagactgccacctttgaacttctggattttcctaaaaggtagattcttttgcatataatttgtatcctatcatttaaagtcaacattcatagaaatcccatttccctttttccttctatcacttggtagtagagggcaggggtattgtgtgttgtgatgggtgccaccatgtctgaatttttgtccacgtagtttttcttctttgaaatggcttcctcttctcctcaacctaccaaagtcttagatgaagccccatctcctccataaagctttccctaactatattagatctcactgatcatatcatcttctagaacattacagtaataacttggagtttcactgtatattacatttttatcattttatttgaattattctctccaacataactataaacatttcccaagggcatagattatttcatgtattctctgtatatctaatgatgttcctagcatagcatagagatgagcttatgatagatcctcactaagtactgtttggttgactgattgagctaacccattcagaaaaatctggtggcattcctctgttcgtatgaacccagcctagacaacaatttcagactaagccaacttcttagtaactatctgcccataatattaactattacgtatgtacatacagtatccctataaaatgtttaaccactcttgactgggggtggtggctcacgcctgtaatcccaacactttaggaggctgaggcaggtggatcccttgagcttaagagttcaagacaagcctgggcaacatgacgaaactctgtctctacaaaaatttaaaaattagccaagtgtggtggcacatgcctgtagttgcagctcctctgggagggctgaggtaggaggatcacttgagcccaggaggttgaggctgcagtgagccatgattgtgccactgaactccaacctgggtgacagagtgagaccctgtctcaaaaaaaaaagtataactactcttaaaaatgactataccttagccaatacctgttttggttactttatacccaaatatgttttaaatgtcttccactagcaccaactgatactggtattaatgtttgcaaggtatatgcatttcattgaaatgttttgaatataactgtaaatggatgattcacattcctggtgtttgattttgttgaatcaagcaaaaccccaaatgaatgatgtgctaatgatgtaatacttggtacttaaagccaatatgaattatttttatagagctatcgagttcagtaaaaccagattatgaagacttagttaagactgtatagatttaatcagttcagatgatatcatcaaatactagctagtatctccatgccagaacatttttaggctgacatctttggacgcagtattgccaagggagaactggcagtgaaaattttctcttctttttctattgtaggtaaaaagcttcctacaactggagaagtgcacatctgggtgaaggaatgccttgatctaccactgctaaggggaagtcatctaaattcttttgttaaatggtaatagtattgatgactctgtctgcaacagttctgtagcctggtctttgctggttagtttcggttctctatatctgtaatactgactcatcattcataatttaaatgaatttacttgggataatggagacatgaattggaggaatctatatcatgaactctcaaggcttcatttggctttaaaatcatgaagtaagaggtcaaatgaaactagagacctcatactcaatgtgtaatgtgttctagggaaaacatctgttggtgagggcaataatcagttcaaaagagtttattaaatttctaatggtaagatgtcacaccccttgactcctttatggagcagggagaattccttctctcctttgtcccacctgttttgtggcctatttgcaaacggtcattgtatgagactgcagatatttggaaaatgatttgctaatcaacccttactaagagcttgagacagtttgggtttttaagtggcaaactcttctctctgttatacatataaagtgactggcatctagtaaataataactaaacagatattagtatgctctcctagtttctctaattttatttatatatagtctaccagaagaccaactgtagctttttaaatatatgtgacatatatctggtacagcgaggtgtctcacgcctataattccagcactttgggaggccaaggcggacggatcactggagcccaggagttcaagaccagcctggtcaacatagccaaaccccttctctattaaataaataaatatatatgtgacatatatctaagtagcatagatgatattatttatgattttccctacacattatctttatagatgtcagctggtaagatttttttggctcaagtcagcctcattctaagaccaagtcagtcagtcacattctgagaccattcacagaccttcttgccttgtgttgccacttgtattgtcttatattgccacttacaagaggcatggtaggttaaagttcatttaattgttatcataaatgaaatgtaagtgattgtaaaaaaaaaattacataatttatttccaaagtcaaatctagcaattgggagaggtttctcttctttttctattctgtataacacaaatgtcttaggctatcacagctaatcaggatagcctgtgcttgcaaattttaaaggaatcctcaaatgattactagcatattaagcacttactaaatgcaggcatggagctaagtgttttgcatatgttatttaattctaattttagccttatgaaatcagcatcaccattcccattttatagatgaagaagcaagtgtccgtaaggttgagtaactttccctaaaatgcatacccaggaggtagcagagtcaggattcaaaccaagtatagctgactctaggtccagagtcttttcagcatgatgtgttcctaccccctaccccactgtctgccaaaccaccaccaccactatctctccacatcttttcctccattgtcaatctttaatagctgtgttgttatgtattgaaagcatgaatgttcactatcttactaaaatgctcccacaatcatgcctctttttgtagtaccatccttccagatacaagtaggaaaagtcgccagaagacaagagctgtagggaaaaccaccaaccctatcttcaaccacactatggtgtatgatgggttcaggcctgaagatctgatggaagcctgtgtagagcttactgtctgggaccattacaaattaaccaaccaatttttgggaggtcttcgtattggctttggaacaggtactgtttgctacatttttaattctccatgagccaaatttttctagagatactagaggtttgtttgttgctttgcttcttcccagtgaaaaccgagatatcctgaaaacagatatctcttaagtatagtgaaataaatgagtaaagaaatgtcaggttgtatgccaagggctccagatatgaggattaacagggtgaagtgtctctgcatatagagtttaagttattgtggcagtggcagggacagaaaagccttcatcactagtctgccctgcaaaaacatttatggtccttcaaggctaaatatatgttttgagtaataacaataacatttatggagcaccagtcactgtattaaatgcttcatttacattatttcattgaatcctcacaagtctatgaggtagttactaatgttaccccaaaggaactgatagtccaagaaagtaagtaacatagctacaaagtggcagagccaagattcaaaattgagtctgttagacactaaagccttagtcacactaacctagagattatctagtgtcatctccaacccagtgcaggagtcctcccaactcccttattccctgatgaattttcatctggcctttacattaacttgaagaaaaatcattgctctaggaattatggtaatgattacaaacatgaagtcactcagacaattgaacagttcttccttatgttgagtctcacatctgccctcccagtgaagaaagctcctcctagcttccactggtggttataattagggaataactttccctctttcccctacccccaatgagctgtttctttctaaatgcaaagcttccttttttcaggtaaaagttatgggactgaagtggactggatggactctacttcagaggaagttgctctctgggagaagatggtaaactcccccaatacttggattgaagcaacactgcctctcagaatgcttttgattgccaagatttccaaatgagcccaaattccactggctcctccactgaaaactactaaaccggtggaatctgatcttgaaaatctgagtaggtggacaaatatcctcactttctatctattgcacctaaggaatactacacagcatgtaaaagtcaatctgcatgtgcttctttgattacaaggcccaagggatttaaatataacaaaatgtgtaatttgtgactctaatattaaataagatatttgaacaagctaggaaaattgaatttctgctgctgcttcaaagaaaaagctgccccagagcattaaacatggggtattgttaagaagcaaaatgttcttgtttgccatcatgtgtttcacaccacaattctgtgccacagttaagagggtctggtacccttgcaggacctttgtaggttgtgggaaaaagtcgcagaaagatactcaaagtggagcagggaatggagacagacatcagtgatgataaaaaaaaaaaatggaccttaagaaactatttactctgtaatctctaataaaatatggaattccatattagggcaatgagactgaaactactggtgtttttctgccttgagaaaacaaacagttaaaacaagcctcaaatgtattttagtgccacccactggccataggtacaattcagttgttggcttgttttgacttaattctaaaataggtctcaagcctgtatttttatgagtttatttttttaaaaccctgcatatatatgattgtttttcttataactttactatatgaaagcagcataagagtagtcacaaacatgttttgcaacaaagttttaattagaatgtaagttgctcagttatactgttcttcttatgtatgtaaaattttcgtattttgtaaaaacccttagaataaattatcatttgatttaaattgtattagaaaattagcgtgacttctcattttaaataaaatattttaggaattctaaacatctaaa

SEQ ID NO: 325 - DNA, 20261 bp, Homo sapiens
attttctcaccctgacaaactcaaaaggatgagcaagtctgttccagcatttctccaagatgaggcaagtttgtcttttgtaccttcagaaaaatggagacagagggttggaattgctatgccaaggttggtgtgtttgtattccactgtggcagagatcaaagaggtcagaaggactggcccttgcctttcaagtcaatagaagtagtgttgttcatcctggaacagggaaaggcacatctcatttgactcaaacagtaactccttttggttagtgaagtcaaattgcatagatttgggaatgtgacttttgtttcaaagttagtacaaaataagaaatccaggaaggtatatgaactgattattcctctgtagtttggagtagacttgatttgtgaaaacttaatttaggcagcatgactagtttgaaagtgtttgttaataaagtaacaatgacacatcaagctttaaggagtatttactgggtgccaggcactgttacatatatcatttaatccttcaacaaccctaggaggcaggcaccatcattatccccacacattacaggtgaggaaactgagactaagggagattaacctcactcagctagaagggggttcaaccaggactggagcacagatccaagttgcctgctgttaatgactatactatatactgtacggtcttaagaaagcacatgactataatttactattcattgagtacctaatatgtgccaggtacctaatactcattctgtcatctcactcttactaactatatgtggtaaggactattttcttcattttacaaatgaagaaagagccgcagagaggttaaataactttccccaaatccaatagctactgaagagtagatctaggactttaactcaggtcctttgacttaattaagattccatgttcttgcagtcaggtagttaggagcctaagctttggagccagatatccctagtcctggttatgatactaattttctgtgtgatcatggacacattcagtaccttctctgagtctggtttccttgcacctaccacgtgaggttgtggggtatcggtaggataatgcagggaaaacacatagcacagtgcttggcatataatgagtacctggtaaatgttagctgctactgtttgtagttttggtctgatttctaacggtgaaataaaaggcttcattatcaagaattctcttagtagatggaatgttgaggaaagctctgggcaacacataaattatattctgtcactggcctgggcatccttttgtccattcttgggcctttgatgaactgtatctgcaaatattcagcccttgcctatggttaagagcacatgttacagtttcctttggaaagaatcactcattctttggaagtaattcattagctagaagccaacagtaggcatgccatgcagttcaaccatataataatatgaggccgggcatggtagcttatgcctgtaatcctggcactttgggaaactgagacgggcagatcccttgaggcccaggagtttgagaccagcctggccaacatagcaaaaccctgtctctactaaaaattcaaaaaattagccgggcatggtggctcatgtctataatcccagctacttgagagggtaaggcaggggaattgcttgaacccgggaggcagaggctgtagtgagccgagattgtgccactgcactccagcctaggcgatagagtgagactctaattgaaaaaaaaagtgtgtgtgtgtgtgtgtgtgtgtgtgtgtgtatatgtattttcgaggcaaattatataagttcctggtttttaatttttctccttccttcagttttaacctgctgtctcatagctccacacagaagagagttcaaatcatctgggtttgtgtatcagagatgccagaattaagctctatcattttgcatggggtatagggttgaactaggtattaaagaaagtggaaatgcaatcaggccttgctcatctgttccctttgagacttatcatcagtcacatttgttgagtgccagttacatgtaaaacaccattccagatcaacaaggcagagtcctatccttccaataattcactaatgatctgatatactaggtagaatgcagtaggcgctaaaatagagggaaatgactatcagcatgtggggagagagtgtgacaacagagacatttaaaagatatgaatttttttaatccttgagaaaggattcttatccacgtaaagcattaattttgctttcctttaactcctttattaatctgcattacaattggcatccattatattgatgcataattgcatggtcctggaatatgctggcatgaactaactactccataaaggtgtcccttaacccctggtgccactgaactgttccataagctctctaaccctaaaaggagctcactctgaatcataaatttttaaagctactatttaataaactttagattcaaatataacaaaatttgttactgtcacttttctttcttgtcccaggtaaatacttcctcggacatatttaaaataaatacctgtattttacttctttttaaaaaatgtgttaaaatctaatgtgggtagaatgtataatttaatatacttaactctaggaacaaaaagataagcataataacacaggaatatgtaaggggaagtttaaaaattttaaacattaaaaaatatatatatatggccttgagttgaaacagatgagactagcatttcttttttcctagtttaatagtgtgtcaagtaaaagatttgatttttagagaagttaggggctgtgctaataagaggaattaaacatgatgttttggttttaacagtaaatctttttattatctgggtaaagttaatttctcatatataccaatagagttccccaggcaaataaatatataatattaaaagactggcaagaaagctcacaatagtgctgtcttctgcagcactttgggaaagactactttgtaggtgaaaagaaatcacttcgttattttggtagctaagcactgccttcctccttaggtgaggtcaaggcagaccacccactccatcctgaatcccataccctggcaattagcactagcatcctttgaccttgcgtaaatgtcagtggaataccaaaatctcatctttgcctaaacagagattctgatcttgactcattctgaatttaaatattgtgcatattatatgctgttttgtagagtgatgacagagaaacagatacagcatcagaaagcagttaccagctcagcagacacaagaagagcccgagctctttaaccaatcttagcagctcctctggcatgacgtccttgtcttctgtatgtaaacaaaggctccatattaatatctctccgcgtctctgaaccttgctctgacatgctcatgctcattgtaaaacagcctcctcctgtatttctcagggcacaaacagtttctctaatccataattagcttctggctagctacatctatctttttttttttagactaacggggttcatatccatcataaacaaatctttgtggggttttttgttgttgttgatgtaagtacttcacaaataaacttaaattgccaagaagatgaaccactaaatttttctgtgcaacaaatggggtaactatgataaaatctgcttgtatcagatatgcttttatatatgatttgcaggcatagaattgaacctctcttttagtaatcctgagcaatcaatatactggttgacatgaaagaatatgagaggtaattccttgccttttagaaggcatctgagcagcattttaaaaggaaatatccttaagtgtagttactcagatttgatttaagggaatctaactaatttgactttacatagaacttcttgcataaggtgaagttgtatgtgcatgtagtatgtatgtaaaaatatatgtaaatatatccacatacacttatctgagtatcagatgtgcatacacatacatatattcacccaagtatgctgaagaaatgataaaactgtgcttaaattcttgctagccttgtgtttctgaaaccttttttaaaaacctatttaaattgagtttctgctgataaaaatctaacatctgcctttgggaaggttttaaactcccttcatcaatcatccattttctacccttcctgacctctaaaagcgcatggctcagtaagcatttttctagattcagtggatgggtaacatggtaaaattcctttttagtgccttggaaattcgatacagcagtgtgtcactatgattagagtgtctgggttttctcacatcttctttcttttggattttaaatattaagcatgccagaaaatggatgcctttgaatgccacctagcataaaatcaccctgctttgaaatgagccagcatctaaataacattgcatttcacttttcatctatgtcttatagggaaaattatttaaaaacattagtcggctgggcgcggtggctcatgcctgtaattccagcactttgggaggccgaggtgggcagattacttgaggtcaggagtttgagaccagcctggctaacctggtgaaaccccatctctactaaaaatataaaaattagctgggcatggtggcgtgcgcctgtaatcccagctgcttgggaagctgagtcaggagaatcgcctgaacctgggaggtggaggttgcagtgagccgagatcaagccactgcactccatcctgggcaacagagtgagactctgtctcaaaaacaaaatgaaacaaaaaactctagtcatgtatatcatgtcaggttgtctttatagatatgtctttatgctatattgaattaactgcttttataagcaagctaaagaaataatgccagcagggattatatccatgatccttgtgctaggtttaagaatgagatagagacaaacactatgtatttctgatgctttcaggtgagtggcagtgtgatgagtgtttatagtggagactttggcaatctggaagttaaaggaaatattcagtttgcaattgaatatgtggagtcactgaaggagttgcatgtttttgtggcccagtgtaaggacttagcagcagcggatgtaaaaaaacagcgttcagacccgtaagtacattttagagtcacctaccttctcttagttctccaactgtcaatcttacaggaattggaaggaaataaagtaatcaagaggagggagggtatgtgttaagaggaatgtttgaaaagttggggggaaatgctgttttattctataaattcatatgtcaaacattaaattataaaaatcacagagaaaggccgggcacggtggctcacgcctgtaatcccagcactttgggaggccgaggcgggcggatcacaaggtcaggagatcgagaccatcctggctaacatggtgaaaccccatctctactaaaaatacaaaaaattagctgggcgtggtggcgggcgcctgtagtcccagctactcgggaggctgaggcaggagaatggcgaggaggcggagcttgcagtgagctgagatcgggccactgcactccagcctgggcgacagagtgagactccatctcaaaaaaaaaaaaaaaaaaaaaaaaaaatcacagagaagcacaaaatgtttcaacttgaaaagaacctttggggtcatcttgttcagttccttcattttacagataagaacgcaaggaccagagaagacaagtaacccatatatgtgaattcagatagaagcaaaatgaggaatgaggacctgaacccatctctttccaccacactctcaaactttttacaaaattagggatacatgggacacacttcataaagctcagtggtataaaaatagttaagactctagaatgagagaattttcatatttaaattatatcttacagaactttaggggaaattactaaaattattgttttaaatcacaggtttaattgcacttcagttttttttctttttttgcaaacgctgaatggtattccctacttatccctatacagaagtctgattcttaattattttgctgagacaagtgcaatccttttttcttttattcttattataaaaacaactgagctcaacatcctttatttttttaacattgaagataacttgactaggtatttactaagattaatttatttcaaaagacggtaacaaaaacttaaaaatactgcaagcaccaaagcgttttctcagaggggaacaaactaggggaacaaacagatttaagctctatgctgaaagtgtgttttctttttttcttttttttttttgaggtggagtttcactgttgttgcccaggctggcacgatctcagctcacagcaaccttcgcctcccgggttcaagcgattctcctgcctcagcctcctgactagctggaattacaggcatgcatcaccacacccagctaactttgtagctctgtgtgtgtgtgtgtgtgtgtgtgtggtttttttttttttttttttgagaccagcctggctcatggggtttttccatgttggtcaggctggtcttgaactcccgacctcaggtgatctgctcaccttggcctcccagagtgctgggattacaggtgtgagccaccgtgcctggcctggaagtgtgttttctgcccctttccacccctgcatattagttaaggccaaaggaaaaaaggaatgcaggaaatgcccgttaaaaatcttcaaaacaatataaaatgatcaattccactaaaaccctttacacatttaagtataaaggtattggtaggaaaatttgttattcactgcttttctcagtgtcatgaaataattatttctgctgtcagttttcaatgtatttaaaaaactagaggtggaaacataacttttattttctttgactttgtctgttcaattctccttttcagatatgtaaaggcctatttgctaccagacaaaggcaaaatgggcaagaagaaaacactcgtagtgaagaaaaccttgaatcctgtgtataacgaaatactgcgggtatctatgaactctctctataggaaaatcctagatggtgacctgtttaccatgtcttctttgggtagtagctctacaggataaagtcagtcaccaagagaggagaaggaagggaatacaaatgttctgagactgttttgtttgagacaaaacaacctgaatgttgtatacgttatttcattcactccccatatataaactgccaggctggtattggtatctgcatctcacagatgaggcaaatgaaacttggagaaatgaagtaacttatttaaaaacacacagcttggctgggtgaggtggttcacgcctgtaatcccagcaactttgggaggccgaggtgggtggatcccttgaggtcaggagttcaagaccagtctggccaacatggtgaaaccctgtctgtactaaaaatacaaaaatgagccagcatggtggcaggcacctgtaatcccagctacttgggaagctgaggcaggagaatgacttgaaccagggaggcggaggttgcagtgagccaagatcacaccactgcactccagcatgggtgacgagtgaaactctgtctcaaaaaacaaaacaacaaaacaaaacaaaaaacaaaaaaaacccacagctgataaagttgagcattgcaaccagaatgatcttataaaagcacaattctgattatgctatttttctgctttctataacccttagggtcaaagccatctttcttaacatgcacaccagtcccttcacaacctgaactccagcctcaactttcctctctcatagtctttgttccagtcaccctgaattcttttcattattttaaggaagtacattttctcacaattctgtgaatttctgttccttcaggctggaatattcttccacacattatttccctaactgcctcctgtactgtcttaaatacctcctcttaatgaggggctgtgcttaacccctaagttctcctgctgtctgctgcctcagtaatcttgctttatagcaggatatgttaacagcagtttaactagtggttttattgtcttccttgccactaaattgtaagttccatgagggtagggaccaacttggtgttgtttgtaaactgtgtgtctttgggcacctcagatctgccaagtcgggttaatgctagttttcagatttgcaaaaggaagataataatagtacttacctacctaccttagcagtggagaacagtaaattagttaatttgtgtgaaagatcaacacacattaagcatttaataaatcttgatccttaatctgggataggtattcaaaatatgtttactggaaagataaatggacagatgaatagaaagtatacttggctcatattctttttcttcccaaaactacatcatgctgccttagtcatgactaacagatcatttaaaactaaaaataagtgttgttcattccctctttctgaaaactctgtccaagtatttgatcatcctctggaaaaataagcagttaaatcaacactcagtcatccatggtctgaattaaccacctgtagaatttttgtaccaagtttttaattacagtttgactatgatataccctagtaccctggctatttctgggtcagctacttcaaccctatactcaggaaaagccagataatttaaatgttaagctcagagaaaggcagacttactacaaccacagtggacattcaagtagtacatcatgaagccaaatggaaattatttttagattagaagtactattgtcctttccatgattatatgtaattaaagattgactacatttgagatgaaaaactgttaggatgccagaccttttctacttggccatatgcagcaggaaaagacaagtttatttatttatttattttaaatacctcatctgtgtgggatgttgatagtgggggaggtgtgtgtatgtggcagcatacatggcatatgggaactctgttctttctgctcagttttgctgtaaaccgaaaactgctctaaaaagactattttaaaaaagaccttgttcttaagtagaaaacagagaattcggttacatttgatttgtattttagactcaattttgtattacatctagtctaaaaatattcagcgaaaattgaaaaactggcttttattgttagagagctattaccaactatgatatctgagccttggtttgcttttccagagtggggaagcaaatcagcttttatgaaagatggattttagctctttgaaacaagatgcttagaataagatgactttgcaatatttttgggactcgaaacctaacagataagaaaatttgctatatacagatgaatttctcttcatctctgtgttataactttggcatcaagtaatgtttttcatcatttaattttcttctttgaacttcagtataaaattgaaaaacaaatcttaaagacacagaaattgaacctgtccatttggcatcgggatacatttaagcgcaatagtttcctaggggaggtggaacttgatttggaaacatgggactgggataacaaacagaataaacaattgagatggtaccctctgaagcggaaggtgagtccggaattttttgtttgtttatttggttggttgatgtggtacctagtgtataggaaaaagcttaattgcatttaattcagagtacagatctgtagtttgggagaattttaaactagaggaaaaaaaagaaaggtaaaaaaggttattgggaacatgtttaaatcatttaacacaaatgtttcagagacttcaggaaggtcttttaaataattcagtcctttgaaatttgatactgacttttagcctaatatttggctgaattttgataaatgttccatgtgttacttgagaccaaagtgtattcaatgattaaaggatgtaatgttctatatttatcaattaagtcaaaactagttcctgaaatcttttatatcctcatgggttttatgtctgtgtgtactgtgaattactaggagagttacaattgtgaatttgtctttttctccttttagttttattatttttgattcactatatttgagattgtcttattacatatacatacaactgtaattgttatattttcttgatgaattaaccattttatcattttgaaattccctttttatctctagtaatgcttattgccttaaaatctactttgcctgtatttatatagctctattagcttccttttgattagaagtttgtttctatcttttgattttcagccttttaaaattcttatagttcagatatatttttataagcaatagttttgatgtttttccagtcttaaaatatttgtctcttaattggattatctagtccatttgcacttaatataaatattgatgtatttgggtccaaatctagtatcttactatttgtcctgttttcttattttcgtaattgcctcctttgggattattattccattttttctctctcttaatatgtcagtcatagtttattttcatttttctttattagttcctgtagagattataatatgcacccttgaattcaaactgtaatataaattagaacttttgccactttcagaacagtggaaggaaccaagaacattttaactccatttacccattctctcatcctttgtgctatttttggtcatgttttaattgtatatatttttaagtcccataagacattaccgttattgttttatacggtctattaatttagatttaaccacatatttgcctttcccttgctctttatcctttcctggatttatccgtggagttgtttcttctgttcaagactctcctttagttttactcttagtgaatatctcctggcaacagattatttcagattttcttggtatcataacatctttttcaatcttggagggatatttttgctctgttgctaggttgacaattatttctttcagtgttttgaagatgtcatttcatagtatttggtcatttctgttgtgaagtcagctgttagtcttatttttgctcctttgaaggttatgtgttcttttccagattttaggatacttttctttgtctttgatttttagcaattgtactataatgagcctaggtgtagttttctttaatttatcctgaggtttggggttcagtgagctgcttgaatctatctatgttttggtatctttcatcactttgaaaatttctcagcaactatttcttcaaatattacttttgccccactattttctcctctccttctggaaactccaattacaagtatgttatacctttttattctgtccaacatgtctcttatggtcttttctgtatactttttttcttatatttcagtccatgttttgctaaccttttcacaattcaacaattttatctgctatgtctattctgttgttaaaaccatctacaatttaagccaatctataatataaagcttatattttcgaaagcatattttcttttgactattttgattccatttctctcctaaaattctctatcttaacattgtctttaaaaatatagcatgcaaagttatttaatgtatgtacttaaaaattccagtatcttaaacatttgtgagtcctgcttatctattttttaaaatcttagtttggacacttagttctttgtcttggtatgcccgttcattttttgatcatatgtggggtattgcatatgagaacgttctaggaataattggggaggatttacttttgcttctgatacagcaggcacagaccaccttcatttaatctgggaataaactgactttgaagcacaagcccagttttcatgtgatctggtctagtttttgtttgcttatattcctaggctaaggcccttcagaggttccaactgaaagccatgggaaatagttctcaaaatcagcatgcatctgattcacctgaaggacttattaaatcacagattctggggctgggtgcggtggctctcagctttaatcccagcactttgggaggctgaggtgtggattgcttgagtccaggagttggatggagacaagcctgaggaacgtggcaaaaccctgcctttgcaaagaaattaaccaggcttggtggcatgcacctatagccccagctactcaagaggctgaaatgggaggatcacttgaacccaggaggtggtggttgcaatgaactgagatcacgccattgcactccagtgtgggcaacaaagcgagaccctgtctcaaaaaaaaaaaaaaaatagacccactagattctgagccctattcccaaggtttacgggcccaagaatatacatttttaacaggttccctgtcaatgcagctgacctagaaacggtactttgaaaaccactggtctagagtgtttttccagtgccattccttcttgacaggccgtgggctccaagttttgtctccccagcctcatgaaactgctaaaagtcctgcttaccttttcagtctcattctgttaggctttttatgtgctcagtttggcactacttaaatgtctcaaagtgaaaagcagagaagaatgtcagactctaagatcttgttcatttgagtcctgtctgtgttaataattctttagcactttcaaactgatatttaaaatcccaccttttaaattgttattagtttaggggttgatgtgatccaagctagtccatcatagtaggaagtgataaatataaataactaatacaaaccataacttagtgtctacacaacagtggaactgttttagttccactaaagaaatggttctcaaatgttatatcaaaatcacttgaagcacttatttctagccctacccaagacctgaactcctcagaagatatcaaaagcatctcatttttaactggctaccattacgtttctgatacatacccatattttgaaaataaagctctaaagagccagaatttgaaagtaaaaaactatcttatgcaggtttcttatacaggtttagcatccctaattcaaaaatttcaaatccataatgctccaaaatctgaaactttttgagtgccgatatgatgccgtaagtggaaaattccacacctgcttcatgtgatgggttgcataaagttattaaaaatgttatataaaattaccttcaggctatgtgtagaagatgtatatgaaacataaatgaattttgtgtttagacttgggtcccatccctaagatatctcattacgtatatgcaaatattacgaatttcaaaaaacaaatccgaaatctgaaacttttctgatcccaagcatttcagataaggaatattcaacgtgtacttgaaaataacagatagaagtttaaaaaattattgttcagtctttgttatacttacagacttctatgcatttggcctaaaataatcagattagtgcagctttgaaaatgtaagatatggcctttccccccttactttcacacactatctcatactccttcaaataaagggaatacaaataaattgttttatatgctggctgaatagctaacaaaatatttgtgttttgatcaaaattaaagcattcaaagaaacctctcccatctccaagaaagccattctggtttcttcaccatctttgagactaaaggccttgaaatattttctgggtatcctgcaagatttttcaagatatacaacctagttttcccaggtattaaggcaacagtctagttctgatgcagagagaaattttaatccagagcactcatgagtgacacatggtcccagaaatgggacagatatggttctgtaatgagacctataccaacaaacaggatgaaaagtttgtctcccacctgctgacatttcttcacttttcagacagcaccagttgcccttgaagcagaaaacagaggtgaaatgaaactagctctccagtatgtcccagagccagtccctggtatgtaatgactttctattcagatttatgtcctttccttatccctcccttctcacagtatttactatgcgttttcaaaggtgaggccctaaagaaacttatcaagttagtaacgtatagaccaaatgagtctattcacagttgtaaataagaaaattctttttttgttattgtggcaaaaaaaaaaaaaaaagaaaacataaaatctaccatcttcaccatttttaactgtacagcttagtagtgctaagtatattcacactgttgggaaacagatctccagaaccttttcatcttgcaaatctgaacctgtttatctattaaccaacaatttccttttcctctactaccagcttctggtaatcatcattttactttctgtttctataagaaagttctcatttttttttttagtttagtttatagtcattaggtttcacctcactctccaaaaatttgtatctgcacaatgtgaatggcctgtattcagaatttgtgtattcctgtgtttggaatttggacttattgatagtgctataagaatagaacctgagtgttctttttcacaggtgggaattaagaggactccagagaacttaaagctcattcaccctccactctcagggtctcattaagagataaagcttttccctcaagattattaattgcctccttgtcaggtcttcagcccagttaaggagcaagagactagcaggaaatgaatgccagccagctccttgctccatttcccaagcaagttccccaagttagtctctttaagaatctgtatgaatgttatggctgaaatcagaggttgtaaactcaaatgctttcagtaaccaggcagtgaagctagtgagatggaagaaataattgatggtgaggatagtgactgaactaaagaaaagcattctgatgtagtttataccgccccccgccccccaaaaaagaaagaattagagggcaagtaaagcatattttcaggctggattgctgtcagactgccacctttgaacttctggattttcctaaaaggtagattcttttgcatataatttgtatcctatcatttaaagtcaacattcatagaaatcccatttccctttttccttctatcacttggtagtagagggcaggggtattgtgtgttgtgatgggtgccaccatgtctgaatttttgtccacgtagtttttcttctttgaaatggcttcctcttctcctcaacctaccaaagtcttagatgaagccccatctcctccataaagctttccctaactatattagatctcactgatcatatcatcttctagaacattacagtaataacttggagtttcactgtatattacatttttatcattttatttgaattattctctccaacataactataaacatttcccaagggcatagattatttcatgtattctctgtatatctaatgatgttcctagcatagcatagagatgagcttatgatagatcctcactaagtactgtttggttgactgattgagctaacccattcagaaaaatctggtggcattcctctgttcgtatgaacccagcctagacaacaatttcagactaagccaacttcttagtaactatctgcccataatattaactattacgtatgtacatacagtatccctataaaatgtttaaccactcttgactgggggtggtggctcacgcctgtaatcccaacactttaggaggctgaggcaggtggatcccttgagcttaagagttcaagacaagcctgggcaacatgacgaaactctgtctctacaaaaatttaaaaattagccaagtgtggtggcacatgcctgtagttgcagctcctctgggagggctgaggtaggaggatcacttgagcccaggaggttgaggctgcagtgagccatgattgtgccactgaactccaacctgggtgacagagtgagaccctgtctcaaaaaaaaaagtataactactcttaaaaatgactataccttagccaatacctgttttggttactttatacccaaatatgttttaaatgtcttccactagcaccaactgatactggtattaatgtttgcaaggtatatgcatttcattgaaatgttttgaatataactgtaaatggatgattcacattcctggtgtttgattttgttgaatcaagcaaaaccccaaatgaatgatgtgctaatgatgtaatacttggtacttaaagccaatatgaattatttttatagagctatcgagttcagtaaaaccagattatgaagacttagttaagactgtatagatttaatcagttcagatgatatcatcaaatactagctagtatctccatgccagaacatttttaggctgacatctttggacgcagtattgccaagggagaactggcagtgaaaattttctcttctttttctattgtaggtaaaaagcttcctacaactggagaagtgcacatctgggtgaaggaatgccttgatctaccactgctaaggggaagtcatctaaattcttttgttaaatggtaatagtattgatgactctgtctgcaacagttctgtagcctggtctttgctggttagtttcggttctctatatctgtaatactgactcatcattcataatttaaatgaatttacttgggataatggagacatgaattggaggaatctatatcatgaactctcaaggcttcatttggctttaaaatcataaagtaagaggtcaaatgaaactagagacctcatactcaatgtgtaatgtgttctagggaaaacatctgttggtgagggcaataatcagttcaaaagagtttattaaatttctaatggtaagatgtcacaccccttgactcctttatggagcagggagaattccttctctcctttgtcccacctgttttgtggcctatttgcaaacggtcattgtatgagactgcagatatttggaaaatgatttgctaatcaacccttactaagagcttgagacagtttgggtttttaagtggcaaactcttctctctgttatacatataaagtgactggcatctagtaaataataactaaacagatattagtatgctctcctagtttctctaattttatttatatatagtctaccagaagaccaactgtagctttttaaatatatgtgacatatatctggtacagcgaggtgtctcacgcctataattccagcactttgggaggccaaggcggacggatcactggagcccaggagttcaagaccagcctggtcaacatagccaaaccccttctctattaaataaataaatatatatgtgacatatatctaagtagcatagatgatattatttatgattttccctacacattatctttatagatgtcagctggtaagatttttttggctcaagtcagcctcattctaagaccaagtcagtcagtcacattctgagaccattcacagaccttcttgccttgtgttgccacttgtattgtcttatattgccacttacaagaggcatggtaggttaaagttcatttaattgttatcataaatgaaatgtaagtgattgtaaaaaaaaaattacataatttatttccaaagtcaaatctagcaatttggagaggtttctcttctttttctattctgtataacacaaatgtcttaggctatcacagctaatcaggatagcctgtgcttgcaaattttaaaggaatcctcaaatgattactagcatattaagcacttactaaatgcaggcatggagctaagtgttttgcatatgttatttaattctaattttagccttatgaaatcagcatcaccattcccattttatagatgaagaagcaagtgtccgtaaggttgagtaactttccctaaaatgcatacccaggaggtagcagagtcaggattcaaaccaagtatagctgactctaggtccagagtcttttcagcatgatgtgttcctaccccctaccccactgtctgccaaaccaccaccaccactatctctccacatcttttcctccattgtcaatctttaatagctgtgttgttatgtattgaaagcatgaatgttcactatcttactaaaatgctcccacaatcatgcctctttttgtagtaccatccttccagatacaagtaggaaaagtcgccagaagacaagagctgtagggaaaaccaccaaccctatcttcaaccacactatggtgtatgatgggttcaggcctgaagatctgatggaagcctgtgtagagcttactgtctgggaccattacaaattaaccaaccaatttttgggaggtcttcgtattggctttggaacaggtactgtttgctacatttttaattctccatgagccaaatttttctagagatactagaggtttgtttgttgctttgcttcttcccagtgaaaaccgagatatcctgaaaacagatatctcttaagtatagtgaaataaatgagtaaagaaatgtcaggttgtatgccaagggctccagatatgaggattaacagggtgaagtgtctctgcatatagagtttaagttattgtggcagtggcagggacagaaaagccttcatcactagtctgccctgcaaaaacatttatggtccttcaaggctaaatatatgctttgagtaataacaataacatttttggagcaccagtcactgtattaaatgcttcatttacattatttcattgaatcctcacaagtctatgaggtagttactaatgttaccccaaaggaactgatagtccaagaaagtaagtaacatagctacaaagtggcagagccaagattcaaaattgagtctgttagacactaaagccttagtcacactaacctagagattatctagtgtcatctccaacccagtgcaggagtcctcccaactcccttattccctgatgaattttcatctggcctttacattaacttgaagaaaaatcattgctctaggaattatggtaatgattacaaacatgaagtcactcagacaattgaacagttcttccttatgttgagtctcacatctgccctcccagtgaagaaagctcctcctagcttccactggtggttataattagggaataactttccctctttcccctacccccaatgagctgtttctttctaaatgcaaagcttccttttttcaggtaaaagttatgggactgaagtggactggatggactctacttcagaggaagttgctctctgggagaagatggtaaactcccccaatacttggattgaagcaacactgcctctcagaatgcttttgattgccaagatttccaaatgagcccaaattccactggctcctccactgaaaactactaaaccggtggaatctgatcttgaaaatctgagtaggtggacaaatatcctcactttctatctattgcacctaaggaatactacacagcatgtaaaagtcaatctgcatgtgcttctttgattacaaggcccaagggatttaaatataacaaaatgtgtaatttgtgactctaatattaaataagatatttgaacaagctaggaaaattgaatttctgctgctgcttcaaagaaaaagctgccccagagcattaaacatggggtattgttaagaagcaaaatgttcttgtttgccatcatgtgtttcacaccacaattctgtgccacagttaagagggtctggtacccttgcaggacctttgtaggttgtgggaaaaagtcgcagaaagatactcaaagtggagcagggaatggagacagacatcagtgatgataaaaaaaaaaatggaccttaagaaactatttactctgtaatctctaataaaatatggaattccatattagggcaatgagactgaaactactggtgtttttctgccttgagaaaacaaacagttaaaacaagcctcaaatgtattttagtgccacccactggccataggtacaattcagttgttggcttgttttgacttaattctaaaataggtctcaagcctgtatttttatgagtttatttttttaaaaccctgcatatatatgattgtttttcttataactttactatatgaaagcagcataagagtagtcacaaacatgttttgcaacaaagttttaattagaatgtaagttgctcagttatactgttcttcttatgtatgtaaaattttcgtattttgtaaaaacccttagaataaattatcatttgatttaaattgtattagaaaattagcgtgacttctcattttaaataaaatattttaggaattctaaacatctaaa

SEQ ID NO: 326 - DNA, 371 bp, Homo sapiens
caacagtggaactgttttagttccactaaagaaatggttctcaaatgttatatcaaaatcacttgaagcacttatttctagccctacccaagacctgaactcctcagaagatatcaaaagcatctcatttttaactggctaccattacgtttctgatacatacccatattttgaaaataaagctctaaagagccagaatttgaaagtaaaaaactatcttatgcaggtttcttatacaggtttagcatccctaattcaaaaatttcaaatccataatgctccaaaatctgaaactttttgagtgccgatatgatgccgtaagtggaaaattccacacctgcttcatgtgatgggttgcataaagttattaa

SEQ ID NO: 327 - DNA, 371 bp, Homo sapiens; identical to SEQ ID NO: 326

SEQ ID NO: 328 - DNA, 13315 bp, Homo sapiens
atatgtaaaggcctatttgctaccagacaaaggcaaaatgggcaagaagaaaacactcgtagtgaagaaaaccttgaatcctgtgtataacgaaatactgcgggtatctatgaactctctctataggaaaatcctagatggtgacctgtttaccatgtcttctttgggtagtagctctacaggataaagtcagtcaccaagagaggagaaggaagggaatacaaatgttctgagactgttttgtttgagacaaaacaacctgaatgttgtatacgttatttcattcactccccatatataaactgccaggctggtattggtatctgcatctcacagatgaggcaaatgaaacttggagaaatgaagtaacttatttaaaaacacacagcttggctgggtgaggtggttcacgcctgtaatcccagcaactttgggaggccgaggtgggtggatcccttgaggtcaggagttcaagaccagtctggccaacatggtgaaaccctgtctgtactaaaaatacaaaaatgagccagcatggtggcaggcacctgtaatcccagctacttgggaagctgaggcaggagaatgacttgaaccagggaggcggaggttgcagtgagccaagatcacaccactgcactccagcatgggtgacaagagtgaaactctgtctcaaaaaacaaaacaacaaaacaaaacaaaaaacaaaaaaaacccacagctgataaagttgagcattgcaaccagaatgatcttataaaagcacaattctgattatgctatttttctgctttctataacccttagggtcaaagccatctttcttaacatgcacaccagtcccttcacaacctgaactccagcctcaactttcctctctcatagtctttgttccagtcaccctgaattcttttcattattttaaggaagtacattttctcacaattctgtgaatttctgttccttcaggctggaatattcttccacacattatttccctaactgcctcctgtactgtcttaaatacctcctcttatgaggggctgtgcttaacccctaagttctcctgctgtctgctgcctcagtaatcttgctttatagcaggatatgttaacagcagtttaactagtggttttattgtcttccttgccactaaattgtaagttccatgagggtagggaccaacttggtgttgtttgtaaactgtgtgtctttgggcacctcagatctgccaagtcgggttaatgctagttttcagatttgcaaaaggaagataataatagtacttacctacctaccttagcagtggagaacagtaaattagttaatttgtgtgaaagatcaacacacattaagcatttaataaatcttgatccttaatctgggataggtattcaaaatatgtttactggaaagataaatggacagatgaatagaaagtatacttggctcatattctttttcttcccaaaactacatcatgctgccttagtcatgactaacagatcatttaaaactaaaaataagtgttgttcattccctctttctgaaaactctgtccaagtatttgatcatcctctggaaaaataagcagttaaatcaacactcagtcatccatggtctgaattaaccacctgtagaatttttgtaccaagtttttaattacagtttgactatgatataccctagtaccctggctatttctgggtcagctacttcaaccctatactcaggaaaagccagataatttaaatgttaagctcagagaaaggcagacttactacaaccacagtggacattcaagtagtacatcatgaagccaaatggaaattatttttagattagaagtactattgtcctttccatgattatatgtaattaaagattgactacatttgagatgaaaaactgttaggatgccagaccttttctacttggccatatgcagcaggaaaagacaagtttatttatttatttattttaaatacctcatctgtgtgggatgttgatagtgggggaggtgtgtgtatgtggcagcatacatggcatatgggaactctgttctttctgctcagttttgctgtaaaccgaaaactgctctaaaaagactattttaaaaaagaccttgttcttaagtagaaaacagagaattcggttacatttgatttgtattttagactcaattttgtattacatctagtctaaaaatattcagcgaaaattgaaaaactggcttttattgttagagagctattaccaactatgatatctgaaccttggtttgcttttccagagtggggaagcaaatcagcttttatgaaagatggattttagctctttgaaacaagatgcttagaataagatgactttgcaatatttttgggactcgaaacctaacagataagaaaatttgctatatacagatgaatttctcttcatctctgtgttataactttggcatcaagtaatgtttttcatcatttaattttcttctttgaacttcagtataaaattgaaaaacaaatcttaaagacacagaaattgaacctgtccatttggcatcgggatacatttaagcgcaatagtttcctaggggaggtggaacttgatttggaaacatgggactgggataacaaacagaataaacaattgagatggtaccctctgaagcggaaggtgagtccggaattttttgtttgtttatttggttggttgatgtggtacctagtgtataggaaaaagcttaattgcatttaattcagagtacagatctgtagtttgggagaattttaaactagaggaaaaaaaagaaaggtaaaaaaggttattgggaacatgtttaaatcatttaacacaaatgtttcagagacttcaggaaggtcttttaaataattcagtcctttgaaatttgatactgacttttagcctaatatttggctgaattttgataaatgttccatgtgttacttgagaccaaagtgtattcaatgattaaaggatgtaatgttctatatttatcaattaagtcaaaactagttcctgaaatcttttatatcctcatgggttttatgtctgtgtgtactgtgaattactaggagagttacaattgtgaatttgtctttttctccttttagttttattatttttgattcactatatttgagattgtcttattacatatacatacaactgtaattgttatattttcttgatgaattaaccattttatcattttgaaattccctttttatctctagtaatgcttattgccttaaaatctactttgcctgtatttatatagctctattagcttccttttgattagaagtttgtttctatcttttgattttcagccttttaaaattcttatagttcagatatatttttataagcaatagttttgatgtttttccagtcttaaaatatttgtctcttaattggattatctagtccatttgcacttaatataaatattgatgtatttgggtccaaatctagtatcttactatttgtcctgttttcttattttcgtaattgcctcctttgggattattattccattttttctctctcttaatatgtcagtcatagtttattttcatttttctttattagttcctgtagagattataatatgcacccttgaattcaaactgtaatataaattagaacttttgccactttcagaacagtggaaggaaccaagaacattttaactccatttacccattctctcatcctttgtgctatttttggtcatgttttaattgtatatatttttaagtcccataagacattaccgttattgttttatacggtctattaatttagatttaaccacatatttgcctttcccttgctctttatcctttcctggatttatccgtggagttgtttcttctgttcaagactctcctttagttttactcttagtgaatatctcctggcaacagattatttcagattttcttggtatcataacatctttttcaatcttggagggatatttttgctctgttgctaggttgacaattatttctttcagtgttttgaagatgtcatttcatagtatttggtcatttctgttgtgaagtcagctgttagtcttatttttgctcctttgaaggttatgtgttcttttccagattttaggatacttttctttgtctttgatttttagcaattgtactataatgagcctaggtgtagttttctttaatttatcctgaggtttggggttcagtgagctgcttgaatctatctatgttttggtatctttcatcactttgaaaatttctcagcaactatttcttcaaatattacttttgccccactattttctcctctccttctggaaactccaattacaagtatgttatacctttttattctgtccaacatgtctcttatggtcttttctgtatactttttttcttatatttcagtccatgttttgctaaccttttcacaattcaacaattttatctgctatgtctattctgttgttaaaaccatctacaatttaagccaatctataatataaagcttatattttcgaaagcatattttcttttgactattttgattccatttctctcctaaaattctctatcttaacattgtctttaaaaatatagcatgcaaagttatttaatgtatgtacttaaaaattccagtatcttaaacatttgtgagtcctgcttatctattttttaaaatcttagtttggacacttagttctttgtcttggtatgcccgttcattttttgatcatatgtggggtattgcatatgagaacgttctaggaataattggggaggatttacttttgcttctgatacagcaggcacagaccaccttcatttaatctgggaataaactgactttgaagcacaagcccagttttcatgtgatctggtctagtttttgtttgcttatattcctaggctaaggcccttcagaggttccaactgaaagccatgggaaatagttctcaaaatcagcatgcatctgattcacctgaaggacttattaaatcacagattctggggctgggtgcggtggctctcagctttaatcccagcactttgggaggctgaggtgtggattgcttgagtccaggagttggatggagacaagcctgaggaacgtggcaaaaccctgcctttgcaaagaaattaaccaggcttggtggcatgcacctatagccccagctactcaagaggctgaaatgggaggatcacttgaacccaggaggtggtggttgcaatgaactgagatcacgccattgcactccagtgtgggcaacaaagcgagaccctgtctcaaaaaaaaaaaaaaaaatagacccactagattctgagccctattcccaaggtttacgggcccaagaatatacatttttaacaggttccctgtcaatgcagctgacctagaaacggtactttgaaaaccactggtctagagtgtttttccagtgccattccttcttgacaggccgtgggctccaagttttgtctccccagcctcatgaaactgctaaaagtcctgcttaccttttcagtctcattctgttaggctttttatgtgctcagtttggcactacttaaatgtctcaaagtgaaaagcagagaagaatgtcagactctaagatcttgttcatttgagtcctgtctgtgttaataattctttagcactttcaaactgatatttaaaatcccaccttttaaattgttattagtttaggggttgatgtgatccaagctagtccatcatagtaggaagtgataaatataaataactaatacaaaccataacttagtgtctacacaacagtggaactgttttagttccactaaagaaatggttctcaaatgttatatcaaaatcacttgaagcacttatttctagccctacccaagacctgaactcctcagaagatatcaaaagcatctcatttttaactggctaccattacgtttctgatacatacccatattttgaaaataaagctctaaagagccagaatttgaaagtaaaaaactatcttatgcaggtttcttatacaggtttagcatccctaattcaaaaatttcaaatccataatgctccaaaatctgaaactttttgagtgccgatatgatgccgtaagtggaaaattccacacctgcttcatgtgatgggttgcataaagttattaaaaatgttatataaaattaccttcaggctatgtgtagaagatgtatatgaaacataaatgaattttgtgtttagacttgggtcccatccctaagatatctcattacgtatatgcaaatattacgaatttcaaaaaacaaatccgaaatctgaaacatttctgatcccaagcatttcagataaggaatattcaacgtgtacttgaaaataacagatagaagtttaaaaaattattgttcagtctttgttatacttacagacttctatgcatttggcctaaaataatcagattagtgcagctttgaaaatgtaagatatggcctttccccccttactttcacacactatctcatactccttcaaataaagggaatacaaataaattgttttatatgctggctgaatagctaacaaaatatttgtgttttgatcaaaattaaagcattcaaagaaacctctcccatctccaagaaagccattctggtttcttcaccatctttgagactaaaggccttgaaatattttctgggtatcctgcaagatttttcaagatatacaacctagttttcccaggtattaaggcaacagtctagttctgatgcagagagaaattttaatccagagcactcatgagtgacacatggtcccagaaatgggacagatatggttctgtaatgagacctataccaacaaacaggatgaaaagtttgtctcccacctgctgacatttcttcacttttcagacagcaccagttgcccttgaagcagaaaacagaggtgaaatgaaactagctctccagtatgtcccagagccagtccctggtatgtaatgactttctattcagatttatgtcctttccttatccctcccttctcacagtatttactatgcgttttcaaaggtgaggccctaaagaaacttatcaagttagtaacgtatagaccaaatgagtctattcacagttgtaaataagaaaattctttttttgttattgtggcaaaaaaaaaaaaaaagaaaacataaaatctaccatcttcaccatttttaactgtacagcttagtagtgctaagtatattcacactgttgggaaacagatctccagaaccttttcatcttgcaaatctgaacctgtttatctattaaccaacaatttccttttcctctactaccagcttctggtaatcatcattttactttctgtttctataagaaagttctcatttttttttttagtttagtttatagtcattaggtttcacctcactctccaaaaatttgtatctgcacaatgtgaatggcctgtattcagaatttgtgtattcctgtgtttggaatttggacttattgatagtgctataagaatagaacctgagtgttctttttcacaggtgggaattaagaggactccagagaacttaaagctcattcaccctccactctcagggtctcattaagagataaagcttttccctcaagattattaattgcctccttgtcaggtcttcagcccagttaaggagcaagagactagcaggaaatgaatgccagccagctccttgctccatttcccaagcaagttccccaagttagtctctttaagaatctgtatgaatgttatggctgaaatcagaggttgtaaactcaaatgctttcagtaaccaggcagtgaagctagtgagatggaagaaataattgatggtgaggatagtgactgaactaaagaaaagcattctgatgtagtttataccgccccccgccccccaaaaaagaaagaattagagggcaagtaaagcatattttcaggctggattgctgtcagactgccacctttgaacttctggattttcctaaaaggtagattcttttgcatataatttgtatcctatcatttaaagtcaacattcatagaaatcccatttccctttttccttctatcacttggtagtagagggcaggggtattgtgtgttgtgatgggtgccaccatgtctgaatttttgtccacgtagtttttcttctttgaaatggcttcctcttctcctcaacctaccaaagtcttagatgaagccccatctcctccataaagctttccctaactatattagatctcactgatcatatcatcttctagaacattacagtaataacttggagtttcactgtatattacatttttatcattttatttgaattattctctccaacataactataaacatttcccaagggcatagattatttcatgtattctctgtatatctaatgatgttcctagcatagcatagagatgagcttatgatagatcctcactaagtactgtttggttgactgattgagctaacccattcagaaaaatctggtggcattcctctgttcgtatgaacccagcctagacaacaatttcagactaagccaacttcttagtaactatctgcccataatattaactattacgtatgtacatacagtatccctataaaatgtttaaccactcttgactgggggtggtggctcacgcctgtaatcccaacactttaggaggctgaggcaggtggatcccttgagcttaagagttcaagacaagcctgggcaacatgacgaaactctgtctctacaaaaatttaaaaattagccaagtgtggtggcacatgcctgtagttgcagctcctctgggagggctgaggtaggaggatcacttgagcccaggaggttgaggctgcagtgagccatgattgtgccactgaactccaacctgggtgacagagtgagaccctgtctcaaaaaaaaaagtataactactcttaaaaatgactataccttagccaatacctgttttggttactttatacccaaatatgttttaaatgtcttccactagcaccaactgatactggtattaatgtttgcaaggtatatgcatttcattgaaatgttttgaatataactgtaaatggatgattcacattcctggtgtttgattttgttgaatcaagcaaaaccccaaatgaatgatgtgctaatgatgtaatacttggtacttaaagccaatatgaattatttttatagagctatcgagttcagtaaaaccagattatgaagacttagttaagactgtatagatttaatcagttcagatgatatcatcaaatactagctagtatctccatgccagaacatttttaggctgacatctttggacgcagtattgccaagggagaactggcagtgaaaattttctcttctttttctattgtaggtaaaaagcttcctacaactggagaagtgcacatctgggtgaaggaatgccttgatctaccactgctaaggggaagtcatctaaattcttttgttaaatggtaatagtattgatgactctgtctgcaacagttctgtagcctggtctttgctggttagtttcggttctctatatctgtaatactgactcatcattcataatttaaatgaatttacttgggataatggagacatgaattggaggaatctatatcatgaactctcaaggcttcatttggctttaaaatcatgaagtaagaggtcaaatgaaactagagacctcatactcaatgtgtaatgtgttctagggaaaacatctgttggtgagggcaataatcagttcaaaagagtttattaaatttctaatggtaagatgtcacaccccttgactcctttatggagcagggagaattccttctctcctttgtcccacctgttttgtggcctatttgcaaacggtcattgtatgagactgcagatatttggaaaatgatttgctaatcaacccttactaagagcttgagacagtttgggtttttaagtggcaaactcttctctctgttatacatataaagtgactggcatctagtaaataataactaaacagatattagtatgctctcctagtttctctaattttatttatatatagtctaccagaagaccaactgtagctttttaaatatatgtgacatatatctggtacagcgaggtgtctcacgcctataattccagcactttgggaggccaaggcggacggatcactggagcccaggagttcaagaccagcctggtcaacatagccaaaccccttctctattaaataaataaatatatatgtgacatatatctaagtagcatagatgatattatttatgattttccctacacattatctttatagatgtcagctggtaagatttttttggctcaagtcagcctcattctaagaccaagtcagtcagtcacattctgagaccattcacagaccttcttgccttgtgttgccacttgtattgtcttatattgccacttacaagaggcatggtaggttaaagttcatttaattgttatcataaatgaaatgtaagtgattgtaaaaaaaaaattacataatttatttccaaagtcaaatctagcaattgggagaggtttctcttctttttctattctgtataacacaaatgtcttaggctatcacagctaatcaggatagcctgtgcttgcaaattttaaaggaatcctcaaatgattactagcatattaagcacttactaaatgcaggcatggagctaagtgttttgcatatgttatttaattctaattttagccttatgaaatcagcatcaccattcccattttatagatgaagaagcaagtgtccgtaaggttgagtaactttccctaaaatgcatacccaggaggtagcagagtcaggattcaaaccaagtatagctgactctaggtccagagtcttttcagcatgatgtgttcctaccccctaccccactgtctgccaaaccaccaccaccactatctctccacatcttttcctccattgtcaatctttaatagctgtgttgttatgtattgaaagcatgaatgttcactatcttactaaaatgctcccacaatcatgcctctttttgtagtaccatccttccagatacaagtaggaaaagtcgccagaagacaagagctgtagggaaaaccaccaaccctatcttcaaccacactatggtgtatgatgggttcaggcctgaagatctgatggaagcctgtgtagagcttactgtctgggaccattacaaattaaccaaccaatttttgggaggtcttcgtattggctttggaacaggtactgtttgctacatttttaattctccatgagccaaatttttctagagatactagaggtttgtttgttgctttgcttcttcccagtgaaaaccgagatatcctgaaaacagatatctcttaagtatagtgaaataaatgagtaaagaaatgtcaggttgtatgccaagggctccagatatgaggattaacagggtgaagtgtctctgcatatagagtttaagttattgtggcagtggcagggacagaaaagccttcatcactagtctgccctgcaaaaacatttatggtccttcaaggctaaatatatgttttgagtaataacaataacatttatggagcaccagtcactgtattaaatgcttcatttacattatttcattgaatcctcacaagtctatgaggtagttactgatgttaccccaaaggaagtgatagtccaagaaagtaagtaacatagctacaaagtggccagagccaacattcaaaatggagtctgttagacactaaagcttaggtcacactaacctagagattatctagtgtcatctccaacccagtgcaggagtcctcccaactcccttattccctgatgaattttcatctggcctttacattaacttgaagaaaaatcattgctctaggaattatggtaatgattacaaacatgaagtcactcagacaattgaacagttcttccttatgttgagtctcacatctgccctcccagtgaagaaagctcctcctagcttccactggtggttataattagggaataactttccctctttcccctacccccaatgagctgtttctttctaaatgcaaagcttccttttttcaggtaaaagttatgggactgaagtggactggatggactctacttcagaggaagttgctctctgggagaagatggtaaactcccccaatacttggattgaagcaacactgcctctcagaatgcttttgattgccaagatttccaaatgagcccaaattccactggctcctccactgaaaactactaaaccggtggaatctgatcttgaaaatctgagtaggtggacaaatatcctcactttctatctattgcacctaaggaatactacacagcatgtaaaagtcaatctgcatgtgcttctttgattacaaggcccaagggatttaaatataacaaaatgtgtaatttgtgactctaatattaaataagatatttgaacaagctaggaaaattgaatttctgctgctgcttcaaagaaaaagctgccccagagcattaaacatggggtattgttaagaagcaaaatgttcttgtttgccatcatgtgtttcacaccacaattctgtgccacagttaagagggtctggtacccttgcaggacctttgtaggttgtgggaaaaagtcgcagaaagatactcaaagtggagcagggaatggagacagacatcagtgatgataaaaaaaaaaaatggaccttaagaaactatttactctgtaatctctaataaaatatggaattccatattagggcaatgagactgaaactactggtgtttttctgccttgagaaaacaaacagttaaaacaagcctcaaatgtattttagtgccacccactggccataggtacaattcagttgttggcttgttttgacttaattctaaaataggtctcaagcctgtatttttatgagtttatttttttaaaaccctgcatatatatgattgtttttcttataactttactatatgaaagcagcataagagtagtcacaaacatgttttgcaacaaagttttaattagaatgtaagttgctcagttatactgttcttcttatgtatgtaaaattttcgtattttgtaaaaacccttagaataaattatcatttgatttaaattgtattagaaaattagcgtgacttctcattttaaataaaatattttaggaattctaaacatctaaa

SEQ ID NO: 329 - DNA, 705 bp, Homo sapiens
gcagctttgaaaatgtaagatatggcctttccccccttactttcacacactatctcatactccttcaaataaagggaatacaaataaattgttttatatgctggctgaatagctaacaaaatatttgtgttttgatcaaaattaaagcattcaaagaaacctctcccatctccaagaaagccattctggtttcttcaccatctttgagactaaaggccttgaaatattttctgggtatcctgcaagatttttcaagatatacaacctagttttcccaggtattaaggcaacagtctagttctgatgcagagagaaattttaatccagagcactcatgagtgacacatggtcccagaaatgggacagatatggttctgtaatgagacctataccaacaaacaggatgaaaagtttgtctcccacctgctgacatttcttcacttttcagacagcaccagttgcccttgaagcagaaaacagaggtgaaatgaaactagctctccagtatgtcccagagccagtccctggtatgtaatgactttctattcagatttatgtcctttccttatccctcccttctcacagtatttactatgcgttttcaaaggtgaggccctaaagaaacttatcaagttagtaacgtatagaccaaatgagtctattcacagttgtaaataagaaaattctttttttgttattgtggca

SEQ ID NO: 330 - DNA, 193 bp, Homo sapiens
ggcgaacatgggatcttacaacaagcatctcataaatgtcattgaaaacaactagaatgcttgcctgttcttcctgaacagatactagaacgttctacccacttgtcaataagagtgactaatctaggtcaatgccctttccattgtctcctcaggtcttttttttttttttttgagatggagtgtcgcttgg

SEQ ID NO: 331 - DNA, 194 bp, Homo sapiens
ggcgaacatgggatcttacaacaagcatctcataaatgtcattgaaaacaactagaatgcttgcctgttcttcctgaacagatactagaacgttctacccacttgtcaataagagtgactaatctaggtcaatgccctttccattgtctcctcaggtctttttttttttttttttgagatggagtgtcgcttgg

SEQ ID NO: 332 - DNA, 411 bp, Homo sapiens
ttttgtttgcttatattcctaggctaaggcccttcagaggttccaactgaaagccatgggaaatagttctcaaaatcagcatgcatctgattcacctgaaggacttattaaatcacagattctggggctgggtgcggtggctctcagctttaatcccagcactttgggaggctgaggtgtggattgcttgagtccaggagttggatggagacaagcctgaggaacgtggcaaaaccctgcctttgcaaagaaattaaccaggcttggtggcatgcacctatagccccagctactcaagaggctgaaatgggaggatcacttgaacccaggaggtggtggttgcaatgaactgagatcacgccattgcactccagtgtgggcaacaaagcgagaccctgtctcaaaaaaaaa

SEQ ID NO: 333 - DNA, 411 bp, Homo sapiens; identical to SEQ ID NO: 332

SEQ ID NO: 334 - DNA, 704 bp, Homo sapiens
gcagctttgaaaatgtaagatatggcctttccccccttactttcacacactatctcatactccttcaaataaagggaatacaaataaattgttttatatgctggctgaatagctaacaaaatatttgtgttttgatcaaaattaaagcattcaaagaaacctctcccatctccaagaaagccattctggtttcttcaccatctttgagactaaaggccttgaaatattttctgggtatcctgcaagatttttcaagatatacaacctagttttcccaggtattaaggcaacagtctagttctgatgcagagagaaattttaatccagagcactcatgagtgacacatggtcccagaaatgggacagatatggttctgtaatgagacctataccaacaaacaggatgaaaagtttgtctcccacctgctgacatttcttcacttttcagacagcaccagttgcccttgaagcagaaaacagaggtgaaatgaaactagctctccagtatgtcccagagccagtccctggtatgtaatgactttctattcagatttatgtcctttccttatccctcccttctcacagtatttactatgcgttttcaaaggtgaggccctaaagaaacttatcaagttagtaacgtatagaccaaatgagtctatcacagttgtagaatagaaaattctttttttgttattgtggca

SEQ ID NO: 335 - DNA, 193 bp, Homo sapiens; identical to SEQ ID NO: 330

SEQ ID NO: 336 - DNA, 5023 bp, Homo sapiens
ctgccaccccagtatttcagttcagaaacctctggttcctgtgctctcaatcctgaggaggtcctagagcagccacaacccctcagctttggccacctggagggctcgagacagggttcacaaagtgtcccagcagagcaagaatcctttgcactccattccagtgatttcttgcctccaataaggggtcacttgggatctcaacctgagcaggctcagcccccttgctactatggcattggtgggctttggaggacatcgggacaggaagccactgaatccgccaagtaagtacatatgaaagatactaggtctctgaagaggcaggcagcacaagtttgaattttacctccactatttactaactggatgacctcaggctggccagttaaactgctcccagcctcagttttcttacctggaaaatgggtataatgatacttgcttcacatgattgttatgaatattaagataatctacataaaggatatagctccatgcttagcacatagtacatgctcagtaaatatcatgttcttatccctaaatatctttattaaagtactatacttttccttagtgtgtcttcatggtatccatcaatttctggcccctgatcccaaaggcattgaacacttgttgcctatactaggtctttcccagaaacctggctcaggcacttttcctgccttctcttctgcttgccctccagaataagaggccagctcacaacctgacctgcctctgctctaggacaagtagcctgggcttctaaactcgtccccccacaaccaccagcatcaaaggtattcctggggctgggtgcttcatgccttgataattccttacaatagataaggacattctttttctcttccactttctccccctccttgtttacctgcctctttgcattcatgtgggtgtgtaataggtggtagttgacagggtgagctgcctgggcagggaggccaaagcaagagtgtgttctggcagcaggactgccagtgtttgttcactccactgagccagttgtcatctgcatgccctatagtgcatggttgggtttttttttttaatttcttttgctccaaagcaaaagccccaggaccatcattgctattattgctcagtgctctggctgtcagcagctccacctgctctcctgtggagagctcagcccactctctgctggggctgaggttcgggaggcaggtggcttataagtgctttccttaactctctttatagcaggaatttgcctgagacttgttgcggttagaagtaccttgttatcatgtcttttattgtcagacaaatctgtgacttgtctatgtggagctagttgatcagttttccagcccaagatgccataagcacagcatttacagggcctggctcccaggcactgttaagaatccttcatgagggggggaggggggagggatagcattgggagacatacctaatgctagatgatgagttagtgggtgcagcgcaccagcatggcacatgtatacatatgtaactaacctgcacaatgtgcacatgtaccctaaaatttaaagtataattaaaaaaaaaaaaaagaatccttcattagatcccatgtggctgcttctcaagctgttcttctacctggggagcattctcattgtaattagaaaacattttgtgaaaaatacctgtgattgttatctatcatagcagggaaaagggaaaatgacctcccaatagtaggcacttaacaaatatttaagaagaaagaacaaataaatgaatggatgaacatttattaagtatttcttatataccagacactgccagacattatgtatctatttcatttaatcctcccaatagccctattagccattattatccccatttgacagatgaggaaactaactaattccaagttacacagcaaacattcaaagccagagctgtctgactccaaagcccatgcttattttgccttcctaggcagcctctcccagagagatcttgttctttccataggccaggagtcacagggtcctcttctctcctgtagggcaaggtgtaccagaggcagcagttacaagccctggttcttccttctttgtgtagctccctttgccttggcaccttggccagacagaaagaaatcactattactagagatcttgtaacttgctccagagatttatttttaatgactctaggatgtaagggaaaacatttgtttgcacacagctctgcttgtgactacaaaatcaattagatgctcctttgagtgatggagatttaaggaacagcatcattcccaaaatagctaatttttttgattgcttactatgtgccctgcattgttctaagcactttgggtaatgattgatttaatcatgaaaataaacctatgaaatagttaccattcatcttctccatttcttagatgaaaaaagcaaggcccagggagataaagtaactttatcacaagatctcaggtagctcactatgcttgctatatcatcccacgatctctgggctcttgaagaagattctattccagaccctaggagaggacagtgtcctagccagaaggaagcagctttaagattttgtaagggacatatagatgcataatattttgaatctaaaatgcaaacaaagatatcctaatttcagccaagttaaactctagtacctttataacctacatactgttctgttaaaaaatgctgggatacacacagaagccagctagtggaataattaagtattatttaagtctaataactgattcaggtataggtatagcttgctttatggactctatgcatttcctctcagtgctctgtgaaaggaatctgctttttgctttgatgtttactacatagaccacctataatcacttccctattaatggaggtgataaggaaaggatccctagaatatagtgcctaatgtgatatactataatatgatgcagggatgtgtatgctggggaactgagtctccaattagcacatcctttttttcctttataacaccttctgacacagaactttcacacataccctaaatatttttcttgtagataggaattccctaagttcagaccttcatattccctccagaatattctccattatctgctaacatagatatactccagccagaaaattccttacatgtaggcttttatatgatctcaagttgtccctttggcagtatagcatagcggcttgaagcacagattctagagtcaggttgtccaggtgcaaattgcaggtctgtcatttaatgtctggtgaccttgaggaagtcactgtacctcatgttgcctcatgttccttatctgtataatggttttcatgagcattcaattatatatgtatatacctatgtgtgcatgtatctatcttaggatggtttctggggcatggtaagtatggtgtgcatgttagctagtattgttcttttatcagtgttacaagcttgaaacttacatataaatgaatttacctaggataaaaaatattggcgggcccaactttcttttgtgtgatgaattaggagacagcatagcatgaatcagtaaatagctgtggagccttttaaccattatttttgacctttaagaactgcaaatagctgcaaaaatgactaatgagtttctcctattttccctttcaaacagctagaggttagcgaaggggtagtgacacagacaggtggaggatgggagtggctagcaggcaatgagaatatagtgagggcgggccaccccctagcataaaccacgggcaaaattatttgcccctccatcgctgagacctaacattgtagcatttctctctacttccttcctcacaccagactggaagctttgatggcagaagaggccaaacccaagccagcatggaaccagaactactttttttcctgagaagttctatttcatgggctggggctctgagaagcaatgcctcagccccacaggctttggtgaacccaagacaacagggtctgttgctatacttgtcaagcccctgggtgccactggttccatttttttccccatttcattctacaaccatggaggaggcaggagccattgggaatatgccagaagtggagagatgctatcccttttcaggctgaagtcctgccctacagcaggcaatgtctgaagagttcatgagagatgtggtgggcggtgacaagtccctggcagggtgctaactgcagcctccaacatggtgaccactgttgaggtcatgggtgacctctttgctgtgggagatctgcagcagagggtccatttcaagtaggagtggcattggaaaagaaaaaaatgatgagagtgtccaggaaagccacagggtgcctttgtaagcaagaagactagatagagccaggatgggttgagatccaggggtaggtctgagggaggccaacaggcttggagaaccaatagataaggtctcagatacttctctaccacctagcccctactttgggatccacatactggggtcatgcaccaaagggatgatgatcagaaggcctgccaggttttctggattttaattgagtgttaatgaccaaaccaaattatctcgaaagaagtctccctagccgatgaagtcaggggcatggaaatagccttctaagttcttaaaacttacctttacttaactccagtttgccttcatgtggcctgtttacatttgaacagtgccttctccatttttttcaactccttggtgaagcagggttccatttttcagatggagaaattaagaagcagaaatgtcagcagcctctcaacagaggtgctcaaatggtcattctttgtttccacagacaagagtttcagcacttttcgcctccttcaggggccccaggaatccctacctcttactcagcttattacaatatttctgtggccaaggcagagctgctgaacaaactgaaagaccaacctgagatggcagagattggcctaggagaggaggaagttgaccatgaactg

SEQ ID NO: 337 - DNA, 256 bp, Homo sapiens
gggggcagcataggagggagctctttagcaaaggtgatgagacccagtcggatcttctcggagccaggaagaaggcctttcctcctcctcgccctcctcctcccaactgggagaagtacaggctctttcgtgcagcccagcagcagaagcagcaacagcagcagcagaagcaacaggaggaggaggaggaggaggaagaagaagaagaagaggaagaggaagaggaggaggaggaggcagaggaggaggaagagga

SEQ ID NO: 338 - DNA, 113 bp, Homo sapiens
cctgtaatcccagcactttgggaggccaaggtgggtggatcacctgaggtcaggagtttgagaacagcctggccaacatggtgaaaccccgtctctactaaaaatacaaaaat

SEQ ID NO: 339 - DNA, 2257 bp, Homo sapiens
  SITE (2167): n equals a,t,g, or c
atgaccctgtgggctacgggatcccctacaaccacctgctcttctctgactaccgggaacccctggtggaggaggctgcccaggtgctcattgtcactttggaccacgacagtgccagcagtgccagccccactgtggacggcaccaccactggcaccgccatggatgatgccgatgtaaggatgggagcatggaagggacagctgccggggccacgggttgtggggaggacgcctgctcaccaggggcttctcctcttggcagcctccaggccctgagaacctgtttgtgaactacctgtcccgcatccatcgtgaggaggcaagtccagtccccacagtggctttgcagggtgcagggggatgcaagtgagacagggatatgggggatcctgacccctccatgaaggaaccatgctctctgtgggctggggccaccctaggtgaaatagtggcaggactgtgagggtttcaagatgcaggaagggctgatggcctcacctgggtagaggtaactgggaaggcctctaggaggaggtggctgatgtcatttcagaggtggtggggacaaaaggggaatgacagtggacaagggcttcaggccaagcagtcccagttcatgtgtcttgtgatcttggtgggaaggtgcttgaactcccagagttctaacttctgcagctaaaacacaggaccctagctgccttctcaccccagctagtggcaggcctcagtaaatgacagaacagtggaatgctcctcgagttgtgatggggtgatgggggagtattttggggaggggtagaaggatggaacctgccaaccatgagtccaaggtgggcagggacaaggttgagggtgtgcatgtgtgggagttcactgagagcagcagccttgctcaaggggcgcacagcccaaggacagagagtctgcagtctagtggaggggccagggctgtccacagctatgagggactccgcttcctgaggcatcgccccaggacagctatgggtgatagcatctgggccctctggctctggaggtgggatctggctctgggggatggagggggggatttgttgggggcctgggctgggaaactggagctgcagggattgggctggacaggccccctgctctgccctcgcccccaggacttccagttcatcctcaagggtatagcccggctgctgtccaaccccctgctccagacctacctgcctaactccaccaagaagatccagttccaccaggagctgctagttctcttctggaagctctgcgacttcaacaaggtgggccagcctcgaggggccctgcagggagatggagagcagctgccccaataacccgggggcagggacagtgtcagactgaggggggtggggcagagctgccctcccttgaactcagcccacttggcccctccccgcacccctagaaattcctcttcttcgtgctgaagagcagcgacgtcctagacatccttgtccccatcctcttcttcctcaacgatgcccgggccgatcagtgtaagaccagggtgggggtgggatgctgggggctttcctggcggcgaggtggagggctggctatctgccctgactcccaggagctcaggcctggcactctgacctcctaggagggaggcctccaaaatggtcactgcctgggcccctccttccccctcccacccgagtgacccctcccacgccacctgccgcagctcgggtgggcctgatgcacattggtgtcttcatcttgctgcttctgagcggggagcggaacttcggggtgcggctgaacaaaccctactcaatccgcgtgcccatggacatcccagtcttcacagggacccacgccgacctgctcattgtggtgagggggctcgtgcggccgggcccaggaggtgcaggggtggtgtcctcttggctgagtctggaggcagcggggaccccacggtgcctctgtccctcctggcacaggtgttccacaagatcatcaccagcgggcaccagcggttgcagcccctcttcgactgcctgctcaccatcgtggtcaacggtaggggcccggagcttgcactccccgcgcttaccaccaggtggtgtccacacaggccaacctgccacttgctccaggtttcaagcccctccagcccacagaaaganacgcaagcttgtgtacccttcatagtagccacattaaaaaaaaagggtgacaacaattgaataatatgttttatctatcatcatctcaac

SEQ ID NO: 340 - DNA, 5325 bp, Homo sapiens
aggggtcacgttttcttttttctggaagacacaaggagaacagtctagaccaatcccttctgcgtatgggggacaggtcatctccaatgggttcaaagtctgctccagcggtggcagaggctctgtggagctgtatacgcgggacaattccatgacatgggaggcctccttcagccccccaggtgagtgacagcatcggtcccgggaggctctgcctggaggagtggagtcttctctgagaatggacgctgagaagcccaacgcagcccaaggagcccagggatgctgctgcctcctggcacccgagctcctttcctttaagggttgttggggaggtgcatggggagaggcaaggaggtgcccttggtaagccgcctttggttggtgcagagcctgggctccgtctgcccgtgcactgtgtgcctgctgtaggttacctgaccacactgacctcagtgatcacacctgtgatgtgcagatgatattgacagtacttacctcacggtttccaggacattaagctgaagatatggtgtgcaaagtgcaagcagtggttacatttctccttcttttccttctcattttccctcttcctcctcatctgcctcctttttctctcacagtctttgtctcttcctctttctcttcctccccctcctcttcttccttcttcttagtggtatagacttgaaattgtttaaagcatgacgagaagaagcttttggagagagaggctgaagaatcggggagcagaggaaggggctaggggagagcgcatgaagcactggactgtgcgtggtcttggaggagggaggggccctggatgtgtgggaagagaacaggagtccctgcacattggctgagtttgcaggtgggtgttgagacatggacgtggggcagtaggctgcagaggctgacgaaggtctgaagtggaagctggagaaggggaacaggtggctggggacacagaaggactcagggtggcatggagtgggggccaagtcaggactggagcccaacaagggaagggcagaggtggagggggcagcacaaaagcctaggatgatctcctccggtaggaaacatctttgatgtatttaagggaaatccattttctggctcattcttaagggaggctgcatggcccagttattaaaaagcgtgaactctggacccaaacaggctggatcaaatcccgcctctggacgttggtagttgtgtgaacctgggcaccttccctaactgccctatacctcagtttcctcattcataatatggcagtaatagcagtatcacatcatagggtgactgtgagaactaagtgggctgctaggcataaagcgtggaatgatggcacagtgggcccagaaggtgtttgccttcttctgtggatgctcggtgtgctcggaccagcttgtacctccacctctgtaaagtggggcagttcagcaaacatctacttcaaatttgccctctgtgatccctaaggtcagaaataatctctgcctccctcccctgacacagaaccatctgaaccttttccgtgaccttcctgttccacttgctatcagagtccgattgtaagcagcttatctctctgctccttggggctggtggaacgtggtttcaggcatccattaggttctttgaccttgaacaaaggtaaagtatgctcaactctggctgcttttccacccagggaaagggcgagaattagaaacacttctggctggcaatgtgctctcttttgtgcattgaaggcgtttgttattcttactttcaaactcaggggcaataatactttggaccaacctagggtccaagcgtgctccagagactcaaaattatcagaaagttgcacaatcttgagcaagaagccctgatgtcattctgggtgatctaagatgcatagctggctagaggtgatgtgtgtcctttaaaagggctgccctgttccttccagcagcaagctcaggaggacagcttaccacacatgctggcagaacaaagggaacctttgtgggggaatcaacagtcaaagtctgatgaacattcttgttgatgagcgtggttcttgtgccagagagaagagtaacacaaatgctggttgatggaggttcctgaatgagcagggaggttggtcttccctctaccaactcactcccatgttggttaacattatacgccctcgcttagagcacaggctgatgccaatggcctgtgggctgagttgggtcctcagatgggttttatggtcctatattgtgattgcctaggccaagtttgtaagaaaaatatttggaatgatttacgatcattagttatgattttattttaaaattaagattttccaatttcttttggaaataaaaagactggcaaggcaggctcttcatctctcatgttactgatgggggaggtgagtaggggccacctcgtgatggggcagccgcccttccacgcactgcagtcagcacagaagccacgtcctcagggaaagctcgttactgtgcttacccgctccctggcctctgcagactgggttggtgggcgccatggagtgcctgtattgctgttagattttaatagattttattttttagaacagttttagattcacagaaaaattgagtgcaaagttcagagaattcccattaccctccgcctctacacaggcacagcttcccccactatggacattcccccaccagaatgatccatttgttacatgtgatgaacctacagtgacacatcattgtcacccaaagtccatagttcacattagcatttgctctcggtgttgtacattctatgggttggtgaggttgatctttcgcccattttaaaaattggattgtttttctttcttttttccttcctccctttcttcttcccctcctctctcttttccttctttccctccctcccttcctccctcccttccttccttccttcttgccttccatcctcccttgctcccttcctttccttctttccttccttctttcttctcttctctctctctctcactctctctctcctctcttctctctttctctctttctttctttttctttctgacaggatctgtcatccaggctggagtacagtggtgcaatcacagcttactgcagcgtttaactccagggctcaggtgatcctcctacctcagttgcccaagtagctgggattaccggcatgtgccaccatgtctcactagtttttttttttttttggtacaggtgaggtcttacttggttgcccaggctggtctcaaactcctggcttcaagcgatcctcccatctcagcctcccaaaatgcgggtcgtttgttttcttactgttgaattttaagagtttttgggtgtattttggataatagtcctttatcatgtcttttccaaatattttctccccatccgtgacttgtcttctcattctcttgacagtgtctttcacagagcagacatttttagttgtaaggaagtccagcttgtcaattatttctttcatggattgtgcctttggtgttggatctaataagtcatcactaaacccaaggtcatctagatgtttttcctatattatcttctaagggttttatagttttgcattttatattagacctatagtccattttgaattaatttttatgacaggtttaagattttttttttgttttttttgagatggagtttggctcttgttgtccaggctggagtgcaatggggcgatctcggctcactgcaacctccacctcccgggttcaagcaattcttcctgcctcagcctcctgagtagctgggattacagacacctgccaccacgcccagctaattttttgtatttttgtggagacggggttttgccatgttggctaggctggtctcgaactcctgacttcaggtgatccacctgcctcggcctcccaaagtgctgaggttacaggcgtgagccactgcgtccggccaagattctttttattttttggaacgtggatattcagttgttgcagcaccatttgttgcaacaaatggttctgtttgttcattgtactgccttttctcctttgtcaaagattggttgactgtatttttattggtctatctctgggctgtttattctgtcccacagatctattcatctgtttttttccaatgccacactgtcttgactactgtaactttttatagtaagtctggaaattgggtagtgttgttcctccaatgttgtttttctccttcaatattgtattggctattctggctctcttccttctccatagtttatcaatatccacaaaataacttgatgagatttttattgggattgtgttgaatatatagatcaatttgggaagaactgacatcttcacaacattgagtctttctgtccatgaatatggaatatctctccatttatttagttcttgtttaatttctttcatcagagttatatagttttctttatatatagcttataaatgtattgttataatatatgtatttctttttccttttttggcaccaatgacaatggtaatgtgttttttaattgtaaattctacttgttcgttgctggcagatggggagcaattgacttgtatattaaccttgtagcctgtaatcttgctatgctcactcattagtttcagctttgttgttgattcttttggattttctacatagacaatcacatcatctgtgaataaatatagttttattgcatccttcccaatatttatattcttatttccttttttttccttttttgccttattgcattagttaggactttcagtacaatgttaaaaaggagtggtaaaaggggacatccttgtctcgctcctgaccattttttcttaactgagcttatggtctgattggttggcacttgtgccctgccatttttcaaatattttaatcacacttgcttgtgggcatttgaatttgtaactactatgttaaaataacaaggagtctccttgaactgcttctggaatttagggcataaggacaaaaagataacatccttcctgtgctccaaaggactggggaaagtcaggtctgtgttataccttgtattaggacgcaccacagttaacagtgattgatcaccttaagaaagaaggatgtgcctacaaacaggaaaaacctgtgcatggggagctcattcccacagtactcagaatggcgatcttcactcttttccaggcccctattggactcatgtcctatttacatggaaatccaaggagggcctgaaagtctacgtcaacgggaccctgagcacctctgatccgagtggaaaagtgtctcgtgacta

SEQ ID NO: 341 - DNA, 349 bp, Homo sapiens
gggattacaggcgtgagccaccgcgcccggcctgcagttcctcttatagtaaaaacatggagaaatcccacatgaggatcataaaaattacattgtttttccatgtttacattgatcacagtaggactttgcacccacaaaggtacaatatctaattgtcataatttactgtaatatactgccacaacacatttgaggtatgtcctatctgctgctggtggcggaggcaacatgaactaatgagccagctcattcatgctaacatgcgtcgctcagaccatttagtccaggtgcaatccctcctcccccgcagcgtgggcctggggtcaggacttaccacgaatgtgca

SEQ ID NO: 342 - DNA, 663 bp, Homo sapiens
tttatgattaacagtatcccctgaggcctcccgcccaccctcaccgcggctccatctccagattcttccccagccactcctggctgcttcctcctcaggtgccgccaccttacggagctgaactcggtcacctgacgcttcagcaagcaggggcttgtcctgaagctggggccgcgggcggcagggtgctcagagccagttcatcctgccctaggatgccaccttggtcctcagcagtcacaggaccactgggtctgaagaacttccccatggcacggacctgcggcagctcagagaaggtctccactgccagcagcatggccaagagtcctagaagcaagtaacctggggaggagaaggtgctggggcagcgcctgggttctggtgatgctccccgcccacctcccagcgcagtgacttgccctggcaactggcaccactcacccccttctcaacgctgccaccagagctcttcgactacccctcccacgccgtgccctggagtgaggtccctccacctgcaaggcccagccccccagtgatttatgggagtcctagtccaggctcctcttcccccttcccccacacgctgttaggtggctggacttaccaagaagtgcgagctggcccaggtggtaaatcacggggtgcaggctgcggccg

SEQ ID NO: 343 - DNA, 663 bp, Homo sapiens; identical to SEQ ID NO: 342

SEQ ID NO: 344 - DNA, 620 bp, Homo sapiens
cgcggctccatctccagattgttcccccagccactcctggctgcttcctcctcaggtgccgccaccttacggagctgaactcggtcacctgacgcttcagcaagcaggggcttgtcctgaagctggggccgcgggcggcagggtgctcagagccagttcatcctgccctaggatgccaccttggtcctcagcagtcacaggaccactgggtctgaagaacttccccatggcacggacctgcggcagctcagagaaggtctccactgccagcagcatggccaagagtcctagaagcaagtaacctggggaggagaaggtgctggggcagcgcctgggttctggtgatgctccccgcccacctcccagcgcagtgacttgccctggcaactggcaccactcacccccttctcaacgctgccaccagagctcttcgactacccctcccacgccgtgccctggagtgaggtccctccacctgcaaggcccagccccccagtgatttatgggagtcctagtccaggctcctcttcccccttcccccacacgctgttaggtggctggacttaccaagaagtgcgagctggcccaggtggtaaatcacggggtgcaggctgcggccg

SEQ ID NO: 345 - DNA, 956 bp, Homo sapiens
ctccaggccaatggtgctgagcgagctgaagcagaagtagacggcccccagcaggctgcagtcgccctgaaggccccacagcaccagcgctggcagcagcacaaagctgctggccaccagcagtcccagtgcaactgcctgcagcagcgcagccctggccggtgacagctgccagtggaccgctacccaggcacgtgggcggctgagcacaggcagcaggcaatggcgcagggtggccacgagagctaaggaggctggcagccccagggctgcatagaccatgcagaaggcctttccgcctggcgatagtggggccatgtggccataacctggagaagagagagtcagtggacagtgagagctctgagtgccatgtctgctggggtccctgcctaccccaatactgccttccgcagaaggctgccctctggtggccttgaactggccaggcccaggttctagctggctctgctcctcttcgtcaggggatcccttaccctctctaggccattcttttcttttttggaaaatgaaaggatgaaagaagacagttcctcaggccttttgtagctgggacaattctgagaactgcgctgcccttaacagatactcccgattccacagctggtggaatatcatccactctttccccaaatgtgtgtcatgtcctgtgtgccaggctttgtactgggatctgaatcagcccaggccctgccccttctggtgggggagtcgggcaggcaaatcatgaagggctgcaaagaggcagcatgggcgagagagggcatgtgccaggcggggaggggtgggagtgcggggtgtgctgggagaacaggatcagctaatacagagctgcaaacgcacatgcctaccggagccagatgggagacaaacaggagtggtggggacaggggtacactggaaagtgtgagctgtatccaaagggcaggccccat

SEQ ID NO: 346 - DNA, 485 bp, Homo sapiens
ctccaggccaatggtgctgagcgagctgaagcagaagtagacggcccccagcaggctgcagtcgccctgaaggccccacagcaccagcgctggcagcagcacaaagctgctggccaccagcagtcccagtgcaactgcctgcagcagcgcagccctggccggtgacagctgccagtggaccgctacccaggcacgtgggcggctgagcacaggcagcaggcaatggcgcagggtggccacgagagctaaggaggctggcagccccagggctgcatagaccatgcagaaggcctttccgcctggcgatagtggggccatgtggccataacctggagaagagagagtcagtggacagtgagagctctgagtgccatgtctgctggggtccctgcctaccccaatactgccttccgcagaaggctgccctctggtggctttgaactggccaggcccaggttctagctggctctgctcctcttcgtcag

SEQ ID NO: 347 - DNA, 2083 bp, Homo sapiens
ctccaggccaatggtgctgagcgagctgaagcagaagtagacggcccccagcaggctgcagtcgccctgaaggccccacagcaccagcgctggcagcagcacaaagctgctggccaccagcagtcccagtgcaactgcctgcagcagcgcagccctggccggtgacagctgccagtggaccgctacccaggcacgtgggcggctgagcacaggcagcaggcaatggcgcagggtggccacgagagctaaggaggctggcagccccagggctgcatagaccatgcagaaggcctttccgcctggcgatagtggggccatgtggccataacctggagaagagagagtcagtggacagtgagagctctgagtgccatgtctgctggggtccctgcctaccccaatactgccttccgcagaaggctgccctctggtggccttgaactggccaggcccaggttctagctggctctgctcctcttcgtcaggggatcccttaccctctctaggccattcttttcttttttggaaaatgaaaggatgaaagaagacagttcctcaggccttttgtagctgggacaattctgagaactgcgctgcccttaacagatactcccgattccacagctggtggaatatcatccactctttccccaaatgtgtgtcatgtcctgtgtgccaggctttgtactgggatctgaatcagcccaggccctgccccttctggtgggggagtcgggcaggcaaatcacgaagggctgcaaagaggcagcatgggcgagagagggcatgtgccaggcggggaggggtgggagtgcggggtgtgctgggagaacaggatcagctaatacagagctgcaaacgcacatgcctaccggagccagatgggagacaaacaggagtggtggggacaggggtacactggaaagtgtgagctgtatccaaagggcaggccccattctgctccagtcaggatgttgccttgcagggattctggctcagtgtgagtgggtttcctgattttccaaaagaagttggaaatatgagctgggcacagtggctcacacctgtaatcccaacactttgggaggctgaggcaggtggatcacttgaggtcaggagtttgagaacagcctggccaacatggcaaaaccccgtctctactaaaaacacaaaaattagccgggcatggtggtgcatgcctgtagtcccagctactcaggaggctgaggcaggagaattgctagaacccgggaggtggaggttgcagtgagccaagatcgcaccaccgcaccccagcctgggtgacagggtcagacaccgtttccaaaaaaaaaaatagttggaaatacaaattccaattcaaaaaatactgagacactttgtggggcaaaaaatacgaaaacccagggctgtgggtctcattgctgcttttccctgggcctgtgcccacgcgatttctctgcaggactccctcatccctgtctgtgccctcctgatccacaagcatctcatgccgacttcctcccctatcttccctcactcccccacccgaggccatggtcctgatctgtccttcccaggttcattctatttgcttccatccaagaatccatcccactctattgtatcccctatctggccacaggctgtggcatctgggcagctctcctgggtctcaaagggtgcctggggtgggactggggaggccacacccttcctggcagttgaagtggaggcaccagttggggtgtgttggtggggagccccagctgtgatgtcaggcctcacagggcctgggctccatctggctctttggggctgaaggaagggctgcatgaaccccaaagcccccaggtagccatggcctcttggagccgcacccccgacttggctgcctggctctcttacctgtggtggtgaggatgctggcagcgaagagcagggctgagggaaggtcccaggtcctgccctctgagctgttgcccagggtggagaccccatgggcctgggtggccagggcagtgctcagcagctcttccagagctccgggtggcaggcaggccctatgctctgcctggaaggc

SEQ ID NO: 348 - DNA, 907 bp, Homo sapiens
atcattttaggtttggaggccatttcaattcaatatgtatgtgttttacgtgtttaattcgtatttactatatattaaaagaatttccaaatagctcagataagaaaactttggtttaaaattgagttattttataagctacatagaatacatcaaaattttataagctgcatagaataggctttaaaatatcagaattaggaaaataaaatatagatggtaaaaattcaaatatttatcaagacttttttcttcactaatgatggggtaaagaatttttaaatggataatataaaacagacagttcaaaaattatttttggaaaatatatgcatcgggaaacataccccacacggtgccatggtttaattattccccagctctacttttgggagcctggaacttgtcagggttgtgaaatagatctcagactattaaggacattcagaaactggctaagccattcaaggaaaatcaggaatttacgtaatatattggactacagtctcaaaggacagagagaaaatcagtcaaatgggttttgatatttttttttcctagaaatgtgtagcaaatgtgattttacaaagcagctaaaaatacaactatctctctggaattgaaaatgtgtaaaataagaccacacactttcaatatgcacaaaatatattttaaatgtttaagttgtattggtaatttactatgttctcctgtagaaaatcataattaaagttggtgctcgtgttgctaaagttttttttctcatgtcaggaacttgcagcttgttctatatagtttggtgaaacaaacaaaacagtttttatctgctgtgacatttaagtttgttgttagctggagttaaatctacatacataaaagtaaaacaataaatatggaaacatcccaa

SEQ ID NO: 349 - DNA, 907 bp, Homo sapiens; identical to SEQ ID NO: 348

SEQ ID NO: 350 - DNA, 907 bp, Homo sapiens; identical to SEQ ID NO: 348

SEQ ID NO: 351 - DNA, 299 bp, Homo sapiens
gaaaggaagagctcctttctagggccatagaataagagtagaagtttttgctcattttttttgtttgtttttactttacaaaaaaataaaaaattttttgctctttgaataacttaacatgaggaatttggaaacaacctctcttgaaaatatattggtattcattcccaaataattcttctaagtaccacttgaccagaggatagggaaaggaggaaaaggtgagtgtatttatatccttgctagtttttgttatatattcagttgcagatctatattatatatcattttattatcag

SEQ ID NO: 352 - DNA, 299 bp, Homo sapiens
gaaaggaagagctcctttctagggccatagaataagagtagaagtttttgctcattttttttgtttgtttttactttacaaaaaaataaaaaattttttgctctttgaataacttaacatgaggaatttggaaacaacctctcttgaaaatatattggtattcattcccaaataattcttttaagtaccacttgaccagaggatagggaaaggaggaaaaggtgagtgtatttatatccttgctagtttttgttatatattcagttgcagatctatattatatatcattttattatcag

SEQ ID NO: 353 - DNA, 299 bp, Homo sapiens; identical to SEQ ID NO: 351

SEQ ID NO: 354 - DNA, 507 bp, Homo sapiens
ctcatttttactctttaactggctcctcactttttagatggatggcactgggctctggagcaaaccatctgttctgtatctgttaaggcctctagagcttcattcattccttcatcaaatattttttgagtgtccactatgtgccaggcactattctagattcaagatataaagtaatatacaaaaacaaaatccagttacaaatataatttttaaagctatttgtgagcataacttcgtaacacatttagaacctttgccttcagctgacatgaattatgttgtctttttgttttttggtccagtttcattagtcattaaagtcatttgaattaaagacaataatccagactccagaggttatggcttttatgtgtttggatactgtcatagtctgctcaggctgccataacaaacacagactgggtggcttaaataacagaaatttatattttcacagttctggaggctgggaatctgagatcagggtaccagtatactgggttt

SEQ ID NO: 355 - DNA, 1830 bp, Homo sapiens
agatgaaacagtttcttctactttattggatacaaagtggaataagattctagatcccccttctcaccggctgtcatttaaccctactttggccagtgtgaatgaatctgcagtttctaatgagtcacaaccacaactgaaagtcttctccctggctcattcagctcccctgaccacagaggaagaggatcactgtgctaatggacaggactgtaatctaaatccagagattgccacaatgtggattgatgaaaatgctgttgcagaagaccagttaattaagagaaactatagttgggatgatcaatgcagtgctgttgaagtgggagagaagaaatgtggaaacctggcttgtctgccagatgagaagaatgttcttgttgtagccgtcatgcataactgtgataaaaggacattacaaaacgatttacaggattgtaataattataatagtcaatcccttatggatgcttttagctgttcactggataatgaaaacagacaaactgatcaatttagttttagtataaatgagtccactgaaaaagatatgaattcagagaaacaaatggatccattgaatagaccgaaaacagaggggagatctgttaaccatctgtgtcctacttcatctgatagtctagccagtgtctgttccccttcacaattaaaggatgacggaagtataggtagagacccctccatgtctgcgattacaagtttaacggttgattcagtaatctcatcccagggaacagatggatgtcctgctgttaaaaagcaagagaactatataccagatgaggacctcactggcaaaatcagctctcctaggacagatctagggagtccaaattccttttcccacatgagtgaggggattttgatgaaaaaagagccagcagaggagagcaccactgaagaatccctccggtctggtttacctttgcttctcaaaccagacatgcctaatgggtctggaaggaataatgactgtgaacggtgttcagattgccttgtgcctaatgaagttagggctgatgaaaatgaaggttatgaacatgaagaaactcttggcactacagaattccttaatatgacagagcatttctctgaatctcaggacatgactaattggaagttgactaaactaaatgagatgaatgatagccaagtaaacgaagaaaaggaaaagtttctacagattagtcagcctgaggacactaatggtgatagtggaggacagtgtgttggattggcagatgcaggtctagatttaaaaggaacttgcattagtgaaagtgaagaatgtgatttctccactgttatagacacaccagcagcaaattatctatctaatggttgtgattcctatggaatgcaagacccaggtgtttcttttgttccaaagactttaccctccaaagaagattcagtaacagaagaaaaagaaatagaggaaagcaagtcagaatgctactcaaatatttatgaacagagaggaaatgaggccacagaagggagtggactacttttaaacagcactggtgacctaatgaagaaaaattatttacataatttctgtagtcaagttccatcagtgcttgggcaatcttcccccaaggtagtagcaagcctgccatctatcagtgttccttttggtggtgcaagacccaagcaaccttctaatcttaaacttcaaattccaaagccattatcagaccatttacaaaatgactttcctgcaaacagtggaaataatactaaaaataaaaatgatattcttgggaaagcaaaattaggggaaaactcagcaaccaatgtatgcag

SEQ ID NO: 356 - DNA, 1830 bp, Homo sapiens; identical to SEQ ID NO: 355

SEQ ID NO: 357 - DNA, 118 bp, Homo sapiens
cgatacaaatggggaacatttagaaagttatgaggctgagatctccactagaccatgccttgcattagctccagatagcccagataatgatctcagagctggtcagtttggaatttct

SEQ ID NO: 358 - DNA, 3230 bp, Homo sapiens
tcatctgtgctccctaccctcagtccactgtaatgagtcccatgcaggatgggtgccccgttcgctgggcattgattacctgtccttgtgtgcccacatgggctacaccgtgggtctgcatcagtataagagtcctgatcccggccaggcgcggtgcctcacgcctgtaatcccagcagtttgggaggcagaggccgggtggaacactgaggtcaggagtttcagaccagcctggcccacatgatgaaaccccgtctctactaaaaaatacacaaaaattagccgggcgtagtggtcggtgcctgtaatcccagctactcgggaggctgaggcagaattgcttgagcgcaggaggcggaggttgcagtgagccgagatcgcgcaagtacgctccagtctgggcaacaagagcgaaactcgatatcaaaaaaaaaaaaaaaacgtcctgatcccagagcctcttcacgcgtcccctaccacagcacttcagagaagcaggtctttaatcagtgtgtctagatgcagctgctgactgtcacccctaccccgcctctctcccagtctgcggacggccagtcacccccattgcccagaatcagacgaccctcggttcttccagagccaagctgggcaacttcccctggcaagccttcaccagtatccacggccgtgggggcggggccctgctgggggacagatggatcctcactgctgcccacaccgtctaccccaaggacagtgtttctctcaggaagaaccagagtgtgaatgtgttcttgggccacacagccatagatgagatgctgaaactggggaaccaccctgtccaccgtgtcgttgtgcaccccgactaccgtcagaatgagtcccataactttagcggggacatcgccctcctggagctgcagcacagcatccccctgggccccaacgtcctcccggtctgtctgcccgataatgagaccctctaccgcagcggcttgttgggctacgtcagtgggtttggcatggagatgggctggctaactactgagctgaagtactcgaggctgcctgtagctcccagggaggcctgcaacgcctggctccaaaagagacagagacccgaggtgttttctgacaatatgttctgtgttggggatgagacgcaaaggcacagtgtctgccagggggacagtggcagcgtctatgtggtatgggacaatcatgcccatcactgggtggccacgggcattgtgtcctggggcatagggtgtggcgaagggtatgacttctacaccaaggtgctcagctatgtggactggatcaagggagtgatgaatggcaagaattgaccctgggggcttgaacagggactgaccagcacagtggaggccccaggcaacagagggcctggagtgaggactgaacactggggtaggggttgggggtggggggttgggggaggcaggggaaatcctattcacatcactgttgcaccaagccactgcaagagaaacccccacccggcaagcccgccccatcccagacaggaagcagagtcccacagaccgctcctcctcaccctctacctccctgtgctcatgcactaggccccgggaagcctgtacatctcaacaactttcgccttgaatgtccttagaaccgccttcccctacttcatctgttgacacagcttttatactcacctgtggaagagtcagctactcacccgctattagagtatggaggaaggggttttcattgcattgcatttctgaaacattcctaagaccctttagttgaccttcaaatattcaagctattctgcagctccaagatgcaattatagaaacagctccttttttattttatgtcctctatatgccaggtgcttcacctgttatttcacttaatcctcataccatatttgcaaaggatgtgttattatctatgtgtgacaaatgaggaaactgaggctcaggggataaagggacttgcccaagtcccacagctggtgtgtgactgcagagactgtgctcttcccagtgtgctgcaatacttctcaaccctcctctaacctgctgtgtcacccgctttccctcccagcccccacatccttaccattttccctccctgggaattcctgcttctgcgaaaatggtatcctctagctcacactttcctaatggccccatctcctgcagaagccaggtgagcccagcactggactgaagttcttgcagacaccccacctgtgcccctatcatcaggggaactgctccacctgagaggaccaactctttaatttttagtaaaacctggaggtgatgggccgggcgcagtggctcacgcctgtaatcccaacaccttaggagtccgaggtgggtggatcacgaggtcaggagatccagcccatcctggccaacatggtgaaaccccatctctactaaaaatacaaaaattagccgggcgtggtgacacgtgcctgtagtcccagctactcgggaggctgaggcaggagaatcacttgaacctgggaggcggaggttgcagtgagctaagatcacgccactgcactccagcctgcggacagaccaagacttcatcccccccaaaaaaaaaagattggaggtgatttacagtgaaagacacaaataaaatacaactgttcaatggaaatagaaaataaacaccataaaagagagaagagaggtaatttgttagcatcaagagtcaagttgctatatggtcaaaggttaaatttatctctaaaaaatggcaggattcaaagttgtacatacatgtgattacttctgttttttacacccacatacagtacaaaagattattaaaaatattcccaaaaggcaggtgcaatgatgcacacttatacccccagccactcaggaggctgatgcaagaggatcgcttgagcccaggagttgaagtccagcctaagcaacatagtgaaaccccatcgccaaaaatataataataattctctcaaaatactaaacagaggtggttttattgataagattttggctgtttggttttccactattctctattggctaaaatttgtttaatgagcatgaaatgtttttattttattttgcttatttttatgattgcaaaaaatgatatgagtttctccctgccaaggcaaaaaaatatatatatacctatatttatatgtgtatgtctagatctatatctctacatctccatcgctgtctctgtctaga

SEQ ID NO: 359 - DNA, 2225 bp, Homo sapiens
tatcttcaaactctttgagtgttgtcaatctgatcggtgaaaacgaactcaaatgttttaaaaaaactaaaaataaaaaataaaacactgtgcaagtcaaaccaagtatagccatgggccagaatcagcccctgggttgccagttggcaagtctgtgctaggtgctgttttcctatagctgtgaactatagtcagcccatcagcgaggccagcaggggctctgaggccatcaacgcacctggagacaaccctgccaaggtccagaaccactgccaggagccctattatcaggccgcggcagcaggtgagtccccacctgccgaggggtggcttccatccacctcattcccacccaaatgcctgacaccctctgagcacctgcttcgttaaccaacagcttcaactccgagcctatttctttgcctctcctcatttacgccacaggggcactcacctgtgcaaccccagggacctggaaagacagacaggatggggaggaggttcttcagtgtatgcctggtgagtagccacctgctagcaccattcccccaacaagcctcagctgcaactgggacctacaggacacaggggttaaaggaaagccttagaatagaaaggaagataagaagcagaaggtgaggaagaacagggcaatcaagaaggcccagaaaagaacaggcagggagcttgttcctcattcttcaggggtcaagatatatctgaggaaaagcatgaaggacgttcatgagatggactagaaaaggaggaagagagaccaacaagctgaagtaacagaaaaccctctttttgtgccatacattttaaggatataccgacaggctctctattcctaaaatatctccctacctagatgccacacagtgccagacagtcaaccattttaaaaaaaattattgagataaaattcatggctgggcgcagtggctcacttttttttttttttttttttttttttggggggatggagtttctctcttgtcgcccagactgaagtgcaacggcacaatcttggttcactgcaacctccatctcctgggttcaagcgattctcctgcctcagcctcctgagtagctgggattacaggcacctgccactatgcccagctcatttttttattttattttattttttttttttttttgtatttttagtagagacagggtttcaccacgttggtcaggctggtcttgaactcctgacctcaggtgatcgtcccgcctcagcctcccaaagtgctgggattacaggcttgggccactgcgcccagccttaaccactttaaacagtacaatccagtaatgtttagtgtgttcacaatgttgtgaaaccattaccactaattccagaacatttccattaccttccccaaaacagcccagtacctccaactctcccctgacaaccactaatcttctatctctatggatttgcctttatggattttatatcagtggaatcatataatgtgtggccatttctgtctggcttctttcagttagcgtaatgttttcaaggttcattcctgttatagcatccatcagtatttcatttttatggctaaataatactcctttctatggatacgccattttgtttattcattcaactgatggacatttgggttgtctctatttcttgcctattatgaatgatgctgctatgagcatttgtgtacaagtttttatatcaacgtacgtttctaaatctcctgggtatatacctagcagtagacttgctggattgtataataattctgtttaactttttgaggaaccaccaaactgtcttcaacagcagcagcaccaagttacatctcaccggcaatacatgagggttcaagcccaccatttttgagatccacgcttttgaatgaaagcattgccttcttttgttttgtttgtttgtttgttttgagacagagtctcgctctgtcgcccaggctggagtgcagtggcgcgatctcggttcactgcaagctccgcctcccgggttcaagccattctcctgcctcagcctcccgaatagctgggactacaggcgcccgccaccacggccggctaatttttttttgtattttttagtagagacggggtttcaccgggttagccaggatggtctcgatctcctgacctcgtgatccgcccatctcggcctcccagagtgctgggattacaggcgtgagccaccgcgcccggccgaaagc

SEQ ID NO: 360 - DNA, 6320 bp, Homo sapiens
agacgccatcgtagtagaagcagggagcggaagaagtctcgatccaggagtagggagcggaagaaatcgagatccagaagcagagagaggaagaaatcgagatccagaagcagggaaagaaaacggcggatcaggtctcgttcccgctcaagatcaagacacaggcataggactagaagcaggagtaggacaaggagtaggagtcggtaggtgaccatcatcctgaataaaatttaataggatcctcagagagtctgtttatcttcctcagtaagagagtattaaaattgtgagtcacaattctatttatagattatggtaaaattattttagtcattacctaacgtatgaagaacacacctaaccacttgaatagcattcacaggtattctcgtgattgataaatctcttgcgaagtgcaggtatgaataggcctattaaaatgcagttgttggctaggtgtcgtggtttacacctgtaatcacaacgaggcgagcagattttttgagcccaggagttcaagaccagcctgggcaatatggtgaaaccccatgtctacaaaagatatgaaaattagcctggggtgatgacccacacctatgatcccagctacttgggaggctgaggtgggataatcacttgagcccagaaggcagaggttgcagtgagccaagatcatgctgttgcactccagtctgggtgacaggagtgaatcctgtcgtaacaaacaaattcagttgtgttcaacactggatttgttgtattaattttattatcacaaataactaaaatctccttttgcatacttaccatatgctgtatgctagaactccttgcatgttattagctcatctagttctcagaagaaccatgttgaaaggtaagtgtgtcgtgcttaaagacgtttaagaaatttgccccagaattccaaaacagtatcattattaagtgctagagccaggagcaggtttcagatatatctaaatgcaaattccatgcatgtgcttaacccactgtattgtacaaactacctcagattttgtttgtaaatgaacacaatttagatttatcttgattggtgggaggaggctttgttgagataggaggtgtacaataaagagcaccaggaggataactaattataaatattcttcaatgaatgcgttattctctgcttgtttacatatgacagtagtatactgacttttgtaaattgattgcaacttaggtcagtgtatgaaagattgaaacatacatttaaaaagggacctgtacttaatacagtaacttggtttttatgatttatcacttgatctttaaatcaatatgaatttttactcagtggttctagtttatagtagtttactactttgaaccttaccaattaagaaatttttttttaagtgcttttttggtcactgacatctagtttttttgtttgttttgagacagagtctcactctgtcgcccaggctggagtgcgatggcacaatcttggctcactgcaacctctgcctcctgggttcaagcgattttcctgcctcagcctcccgagtagctgggattacaggcacccagcatcacgcacggctaaattttgtgtttttgtagagacggggtttcaccatgttggccaggcaggtctcgaactcctgacctcaggtcatctgtccgcctgagcttcccaaagttctgggattacaggcatgagccacagcacccagccagacctaatttttagtggttaataactttttatttttgaaaaacatctacaaattcactgtagatgaaaatatgtaggaatgattcctgtggtatacatattgacctacaagagcacaaaatgactaatgtataaggctagcttttccaacattggatatactatgcaaaagattggaaacagccagatgcggtggggcatgcttgtagacctgtgtactctggaggctaaggcaggaggatcactggaggccagcctgggcaacatggtgagaccctgtctcttaaaaagggatgagggagttggaaacaaatgttatttccaatgagttcagctgtaacactgatgttttaaatcttttgcatctcaaactaaatgtttttgtatcgttgggatttttgtttgaactaattgatttcttattaacaaaatagttatgacttggccataatttgacatatgaaatacgatttactacagagatagaaagaagagaattgaaaagccgagaagatttagcagaagtttaagccggactccaagtccacctcccttcagaggcagaaacacagcaatggatgcacaggaagctttagctagaaggtgtgtatatttcttaattcatttgttccagttcgcctttaaataaatgctcaattgtgtggataagatgaattctttcagtaagagaatgattcacatactttagtaatatggtgacatatttgtgatctagaactatgtaaatagtttaattctcatcctaaacatttgcacaactataagattgagatgtctacaatttctgttttttccttcatgatttaactgatttcatttttctcaaatttagactcccaaatattttcagtttgcatttgaaacttttttttttgagtcttaaatctggttcaagaactattattttctcatctaagatgacttttcctttactttttgtttttctccctcaaatagacaaaatacctgaaacagtaagtaaaattttgtcaatattattattttgaagatggcaattaacagataatacattataagctaatttatttgatcttgtaagttttattcctggtaactatgggagaactttttttttttttttttaattttctgctgtttcggccgggtgcaatcggtcacacctgtaatcccagcattttgggaggccgaggcgggcggatcacttgaggtcaggagttgggagaccagcctggccaacatggtgaaaccccatctctactaaaaatacaaaaattagctgggcgtggtggcaggcgcctgtaatcccagctactctggaggctgaggcacgagaatcgcttgaacccatgaggcagaggttgcagtaagccaagatcgcaccactgcactccagcctgggcgatagagcgagactcagtctcaaaaaaaaaaaaaaaacacacacacacacacaaaaataaattttctgctgtttcaaagatgagtaatggtgaaaccacacacagcacgactatatattgaaatctgcaaaactattcaaagaactgcctcatagagaggcaaaaagtaaaataaaatccaagcacttgtttgcagtatttcccatattttgaaaaatagactttttaggttttgatttttttttctctcgttacaaaattaaggtgttttgttttttgagacagggtcccacccaggctggagtgcagtggcacatgatgacggctcactgcatacttgaattcctgggcccaagcaatcctcccacctcagcctctcaagtagttgggaccacaggcatgcctggctaatttttgtattttttgtagagaagacggggtctccctatgttgcccaggctggtaacacagtgtaacctgatgtgcttccctgggaacccagcctgacagaaactgcagctgaacagcagcaaaagtgtgagctcaccccttctttccattcaccttagtgaatggtattaattccaaatcttcaatggccattttaatgcaaccagttgtagtcacacgtatcttctttctgaaactagtatggaaataatttactataaaattggatttagtatatgctagattgtaatttcattaactctgacaaatattttttaagctcttatttacttgaatgccataagtctattctgtttgtgtttttggatttttttaaaagtgaagccgttaatagcatccaaaatgtcattgatatatagattacttggtgatctttcagataaagttttaaatgtagttctttaatttcagaatatgagattatttactaccttgaaatctggagaatttttttcttaagaaactaccatgtatagaccttttatattggtttcttttttggcttaaaggtcaggatttaaaactgtttaggaaatacatttcagatctgtgacctactttttttattttttatttttattttatttatttatttatttatttatttatttatttatttatttatttatttatttttgagacggagtcttgctctgttgcccaggctggagtgcaggagcatgatcttggctcactgcaacctctgccttctgggttcaggcaattctcgtgcctcagcctcccaagaagctgggattactgatgcgcatcaccacacccagctaatttttgttttctttttaatagagacgggttttgccatgttggccaagctggtctcgaactgctggcctcaagcagtcttcccaccttggcctcccaaagtgctaggattacaggcatgagccaccttgccaagcctgcgacctacattttattgttactgctaatttacaaacttttattctcaaggacaaagtcaagtctatgttatgccttccatgcatatgtgcttcataaaagggaataaaattatagcttgttatatttcttttatgtaaatttcaacaatttttttttttccttttcctctttttttttttttgagatgaagtcttgttgcctaggctggagtgcagtggtgtgatctcagcttactgcaacccctgcctcctgggttcaagcgattctcctgcctcagcaccccaagtagctgagattacaggcgcccaccaccacgccctgctaattttttgtatttttagtagatgcgggatttcaccatgttaataaccaagctggactctaactcctgacctcaggtgatccacccacctcagcctcccatagtgttggaattacaggcgagaggcgtggcgccgggccgacttaacaattcttaaagcaaatccaatttactacccctgcattgtattacccatagtgccccaaaacaaaaacaagttttgtcagtcctgtcccctttataccacattacagagggcgttagtggcatttggcttgattgataaatcagggaatccttaggaagaaaagagttcctctttcaggaattcattgtgaagataatgttacttgttatttgctatatagaaagggtaaacttaacatatagcttgtttagtgtgcatactcattagtgaatttaatgtatgcacactactcattcaacagagtgagtagagagaacaagcattcatttttgggctgggcatggtggctcacgcctgtaatgccagcactttgggaggccaaggcgggcggatcagaaggtcaggagtttgagaccaggctgaccaacattggtgaaaccccatctctactaaaaatacaaacattagctgggcatggtggtgtgtacctgtaatcccggctacacaggaggctgaggcaggagaatcgcttgaacccaggaggcggaggttgcagtgagccaaggtcgtgccattgcactccagcctgggcaacagagtgagactgtctcaaaaaaaaaattcatttttgttttgggatgaatttgtgtttcatgttactagttcctttgtaaatgataaatttgttcaactgctagaagtaatttcctaattgagaaaagttttcctcccattttattagattacagagaatggcaaggtttccttgaccttttagttttggctttttgatttttattaaattgaagactttactaaggtctgtacaatataaaaaattatccgaatgtcttgatcggctggctttttctccctcaagaaacatttagataattctataaatttatttactacttaaccatgctctaaaatttactcagctttcaatatgttacttgcaagacgtaatttttttcacttgttaattggaactgcatataaaaactatgcccatttctgactagtcaattcaaaaatgtttaaaaccactgttgtggtattcttcaaatgtagcttatatcatcttaagaatgattgctttttcttcacatacggctatcggtggagggatgctaaaaatttaaaattttatggaagttggcttgtctctgtacatgcacatatagagagatatatacataatggttttatattgtgttattttaaattcattgaaattaattttgcaggttggaaagggcaaagaaattacaagaacagcgagaaaaggaaatggttgaaaaacaaaaacaacaagaaatagct

SEQ ID NO: 361 - DNA, 584 bp, Homo sapiens
ctcgatttgagctctttcaagcttttttgtttttcacagggatttgctctgtcattctgactggagtgcagtggctccagcatagcgcatggtagcctcaaactcccaggctcaagtgatcctcccacctcagcctaccgagtagctgggactgcaggcccacatcaccatgcatggctaatttttttcttattttttgtagagaggacctttcactatgttgccaagactattcttgatctcgggcttaagcaatcctcctgccccagcctcccaaagtgctgggattgcaggcatgagccactgcacccagcctaagtttgacatgctttttgtagaaaaattgaaaaatatagaaaataataggaagaaaatcacctatgattcctacttcccatcagtacactgtaaacgtgtattttagtgttctcacttaagtgttttgtagcttgtttctgatgtggtccatgtggataatttttgttgataaattagtaatgagtatgtttgtttatgtaacactagtcatcatgacagatcttgttgttgttgttacggagtctcgctccatcgcccagggtgga

SEQ ID NO: 362 - DNA, 3276 bp, Homo sapiens
tgcacactacgaaggtcagtgactgttacctttcctcccatcgtccagccggctagcagcatttctggcaacccagagctctgggccctggaacagggtctccactgcctctcggttgtcctcctcctcctcacgctgcccctccccttctcattacctttactgcttcttccttgtactctcattttcttttttcttttcttttctttctttttttttttttttaagacaagagtttcactctcgttgtccaggctggagtacggtggcatgatcttggcttactgcaacctccacctcccgggttcaagcgattctcctgccacagcctccccagtagctgggattacaggcgcccgccaccacacctggctaatttttgtatttttagtggagatggggtttcatcatgttggtcaggctggtctcgaactcctgacctcaggtgatctgctcacctcggcctcccaaagcgttgggatcacaggcgtgagccaccgcgcccggcctgtactctcattttctgaagtttggagtgcttcggcactcattcctttccctcttcaccatccacactcaatctcttcgctgattcatctagaccatggctttaaataccatttagagcttgaagactcccaaatttgcatcttcagtccaggcctcgctcctgacctacagacttgcttctctaagggaatctggacgtgtccattggacacctgattagcatcttatacatgtgtctgtgagactgagctcctggtcatctcccctgaagctgcgctggcaactccacattctggttgctcaacctgaaaccctgtttctctcacatgcttcacaccctgtatctccacgtccctgtggataccatcttcaaggcagatccaggatcatttctcaccacttcatctgctctcaccctggtcccagccaccaccccctgtcccctggattaatgcagttgcctccaactggtctccctgcttctgatcttactccttacagatgattcccgccatggcagctcttttggaatgcaccttaggttatgccacttctctgctcagcaccctttaggggctttgccccggctcccatttctcgctgccttgttggccctagtgacactggcttacttcaggctcatctcctctcagggcctgtgcactttctccctctgcttggaatgccctttccctgatgtctgcctggcttatgccacctgtacttccttcaggcacaagaggggcccccataatccagagcagcccttcccaactcctccctaccacctgctatgaagcccacccaatgctctgtgttcacggattcatttttattgtctgtctccccactagggagtaattgctctgagggcaggtacttccacaagtgtttggtgaaggaatgagtgaatggcacagggcgggagcacagtgaatgttttttgttcaaataggaagcaatgataccaaataaaaaccaggtagcattgtctcagcagctgcaggaacagtgctatgtgctgaagaagaattggggatcttgaggcctaggcacactctttcagtcttctgatggccattgtggcttttgagggggcagcttctggggtgtgatggggacaaaacccacagtgcaaggctctggggagtgagtatgaggaaagagcaaacgtgggtgacgctgtcagggagtgaaaggatggaatgaggtgaggcgctagtttgagtagtttgaggccaaagcagggtggaaggacggcggtggtggtttttataggatcaaacagattttgacaaaatgaaacaaaagctatctgacaaaagggtagattgaataaatatgctggatatgtacacaggttaaagtgtttccatcacatgcagccagttcctgcttagttccatgtgagttaggcactgtgagggacggtcggtggcagagttttaattccaggcgagtacagcagccgggctgcttcctctattgctcaactgatgtgtgttcagaggatccaaactcatttcactgtcattctaaggaaaacatcatggacaatgtaaattttattctctttctaccctgtttaaaaaaactaaaaaaaaaacctaaaaaaaaaaaaaagtcctccaaaacactgcacaattcaccccaaagccaaaccgagttttaggattgcttaataatgtcttatctttatctcttcttaaaagaaacttcagaatggttcacggtgaaactttctcaaatacagcccctgatcgaggttaagatcagtttggtctggcatcaagtctgaattatagaacactaaggaagaaaaacattcacgtctatggtgacattttttatccgcagggctgggggtggccatgccttagggatgcctgtgaatgcactaacaacaaataaagggaatcttttctgttttttccttttattcccggcaagctgtgagataagagcactctctgaacttttgccggggccagcgtggtgctgggaattttcgtgcctgttacgccacttctgtcatccatctgacatcaggcccgagtattagtattatcaaacccatttttgcaagtgaagcaccggaaagctaaggagggtttgcccgttgctcaagcccactagggtgctgtggtgtgggcagagtccgttgaaaacatgtctggccaggcgcggtagctcacgcctgtaatcccagcactttgggaggctgagaagggcggatcacttgaggtcgggagtttgagaccagcctggccaacatggtgaaacctcgtctctattaaaaatacaaaataaggccgggcgcggtggctcaagcctgtaatcccagcactttgggaggccgaggcgggcggatcacgaggtcaggagatcgagcccttcctggctaacacggtgaaaccccatctctactaaaaatacaaaaaattagccgggcgtggtggcgggcgcctgtaatcccagctactcgggaggctgaggcaggagaatggcgtgaacccaggaggcggagcttgcagtgagccgggatagcgccactgcagtccagcctgggcgaaagagtgagactccatctcaaaaaaaaaaaaaaaaaaaataattagccgggcatggtagccggcacctgtaatcccagctactcgggaggctgaggctggagaatcacttgaacctgggaggtggaggttgcagtgagccaatattgtgccattgcactccagccttggcaaaagagggagactccacctcaac

SEQ ID NO: 363 - DNA, 3273 bp, Homo sapiens
tgcacactacgaaggtcagtgactgttacctttcctcccatcgtccagccggctagcagcatttctggcaacccagagctctgggccctggaacagggtctccactgcctctcggttgtcctcctcctcctcacgctgcccctccccttctcattacctttactgcttcttccttgtactctcattttcttttttcttttcttttctttctttttttttttttttaagacaagagtttcactctcgttgtccaggctggagtacggtggcatgatcttggcttactgcaacctccacctcccgggttcaagcgattctcctgccacagcctccccagtagctgggattacaggcgcccgccaccacacctggctaatttttgtatttttagtggagatggggtttcatcatgttggtcaggctggtctcgaactcctgacctcaggtgatctgctcacctcggcctcccaaagcgttgggatcacaggcgtgagccaccgcgcccggcctgtactctcattttctgaagtttggagtgcttcggcactcattcctttccctcttcaccatccacactcaatctcttcgctgattcatctagaccatggctttaaataccatttagagcttgaagactcccaaatttgcatcttcagtccaggcctcgctcctgacctacagacttgcttctctaagggaatctggacgtgtccattggacacctgattagcatcttatacatgtgtctgtgagactgagctcctggtcatctcccctgaagctgcgctggcaactccacattctggttgctcaacctgaaaccctgtttctctcacatgcttcacaccctgtatctccacgtccctgtggataccatcttcaaggcagatccaggatcatttctcaccacttcatctgctctcaccctggtcccagccaccaccccctgtcccctggattaatgcagttgcctccaactggtctccctgcttctgatcttactccttacagatgattcccgccatggcagctcttttggaatgcaccttaggttatgccacttctctgctcagcaccctttaggggctttgccccggctcccatttctcgctgccttgttggccctagtgacactggcttacttcaggctcatctcctctcagggcctgtgcactttctccctctgcttggaatgccctttccctgatgtctgcctggcttatgccacctgtacttccttcaggcacaagaggggcccccataatccagagcagcccttcccaactcctccctaccacctgctatgaagcccacccaatgctctgtgttcacggattcatttttattgtctgtctccccactagggagtaattgctctgagggcaggtacttccacaagtgtttggtgaaggaatgagtgaatggcacagggcgggagcacagtgaatgttttttgttcaaataggaagcaatgataccaaataaaaaccaggtagcattgtctcagcagctgcaggaacagtgctatgtgctgaagaagaattggggatcttgaggcctaggcacactctttcagtcttctgatggccattgtggcttttgagggggcagcttctggggtgtgatggggacaaaacccacagtgcaaggctctggggagtgagtatgaggaaagagcaaacgtgggtgacgctgtcagggagtgaaaggatggaatgaggtgaggcgctagtttgagtagtttgaggccaaagcagggtggaaggacggcggtggtggtttttataggatcaaacagattttgacaaaatgaaacaaaagctatctgacaaaagggtagattgaataaatatgctggatatgtacacaggttaaagtgtttccatcacatgcagccagttcctgcttagttccatgtgagttaggcactgtgagggacggtcggtggcagagttttaattccaggcgagtacagcagccgggctgcttcctctattgctcaactgatgtgtgttcagaggatccaaactcatttcactgtcattctaaggaaaacatcatggacaatgtaaattttattctctttctaccctgtttaaaaaaactaaaaaaaaaacctaaaaaaaaaaaaaagtcctccaaaacactgcacaattcaccccaaagccaaaccgagttttaggattgcttaataatgtcttatctttatctcttcttaaaagaaacttcagaatggttcacggtgaaactttctcaaatacagcccctgatcgaggttaagatcagtttggtctggcatcaagtctgaattatagaacactaaggaagaaaaacattcacgtctatggtgacattttttatccgcagggctgggggtggccatgccttagggatgcctgtgaatgcactaacaacaaataaagggaatcttttctgttttttccttttattcccggcaagctgtgagataagagcactctctgaacttttgccggggccagcgtggtgctgggaattttcgtgcctgttacgccacttctgtcatccatctgacatcaggcccgagtattagtattatcaaacccatttttgcaagtgaagcaccggaaagctaaggagggtttgcccgttgctcaagcccactagggtgctgtggtgtgggcagagtccgttgaaaacatgtctggccaggcgcggtagctcacgcctgtaatcccagcactttgggaggctgagaagggcggatcacttgaggtcgggagtttgagaccagcctggccaacatggtgaaacctcgtctctattaaaaatacaaaataaggccgggcgcggtggctcaagcctgtaatcccagcactttgggaggccgaggcgggcggatcacgaggtcaggagatcgagaccttcctggctaacacggtgaaaccccatctctactaaaaatacaaaaaattagccgggcgtggtggcgggcgcctgtaatcccagctactcgggaggctgaggcaggagaatggcgtgaacccaggaggcggagcttgcagtgagccgggatagcgccactgcagtccagcctgggcgaaagagtgagactccctctccaaaaaaaaaaaaaaaaaaataattagccgggcatggtagccggcacctgtaatcccagctactcgggaggctgaggctggagaatcacttgaacctgggaggtggaggttgcagtgagccaatattgtgccattgcactccagccttggcaaaagagggagactccccctc

SEQ ID NO: 364 - DNA, 11901 bp, Homo sapiens
aaactcatcactgcctccgagacgggcgagcagctcatcagccgggtaagtcgagcctggagggctgagccagggcctgaggcccatgctgatttggaaaggcagagcaacttggccctaaataggaacctgtaagtgaatgcagtctcaccgcctttgtgattcaaaggagaaggtgagggccgggagtaagagaatagccctgcctggcaagtgctgtttacctgctgtttccatctgtgatgccaaggcatccgtgccagcgcactgccccttaccggcatgatgggaggtcgtaccagcagacactggctgctattggcattgtcatgggcagctgtggccctgatgaagctgtgcggccaaccccagggtgaagctgggtgcttgactcagaggggcacagaggggcaggtttgcatagtgttctcatatgtgctgagcatccagggccttcagaggatgcttatggggcccctgtcacctgtggtctcagggcatttcctgaaatctccactcggtggtctcctgaaccttgtcctcctcaccacccactttttcagctgattgacgagtgttacagccaccctccccaagccaccaggtgtggggccagcccaccaggatggctgcaggtgttcccacgcttctttgatcaaagtacttaaccatgcctgaaacaagatagtcaccaaggcaaagcagtgaacccaggagcaactctcatgcaagacactgcttagcagatgtgctttcttttaggaaaatacagatctagttcaggagttcggcgggttccagttcttagcatcatgtaggtcctttgcagcttggcctgggagcttctcagtacccatgctgcaccactgtgttctggccagtgagggtctggaccaagcccctggggggacagctgtgggagcacttctggaggctggagcagcccttgaagagcacagagttgcttttctggccattttggagtgtaacaatttgaaaaagtaatatatgttgttattagagatatttgccagcaaatttcactgaagtggaaatatttctatggagaaataaagctgctccatctactattagcctctgaaacacactgagtgctacctagggctgtttccacctggatttggaacttagaaccaacagtgacctgtccccttggctgagtccctgctcattttgtaataagtgtattaacgcctgctcgttgaatagcatcaggaagacacttccagaacactgcatattaaagcatcctgaacccaggcggtctagaggtctgtgttctacaaaatctgaaagccaaaattatactccatttgcaaggctgtgctgagaggccaaaaagccagttgcttaatttcttgcttttgatgggagcacagggactttctgcctgatacgctgttgggccctagggacatgtcccgaggctgcccccagtggtggcagctggtggacctttcctggctcactcaggaaccagggactttggtttcctgagctggctacaaacgcccgctgtgctctttccctcccgagcctctactggctgggaagggaggcctggctgatgctgcccctgagcccctggatccgcacgcggctggcctgggtgtggctgtccgttctcctgtgtgtcccctgctgactcttgctcctctcccctcccagtcagagccgcgggcctggtgtggcgcttcctaaacagtgatcagctcatgttgcataacagcctgtgcttgagtctaaactctcttctttctctctttctttctttttcttataatctgctggccgaaggctgttaaaaatatggttggaatggtgagtactactttaagtagcaactgttgtcaggtgagcccctcaacccacccacccccgagttcccctgggcaggctctgagctcggggtgcacgtgctgtcaaacggagccacacgggctgcggcgcccccgcgggtgcgcactgctgctggaccggcggcccgtccccttctctgctctgcctcccctcttcctgctccgcccttcttgcgtccttgatttgacctcctgaggtccaccagacagcaggggcagaaccagctttcagtgagtgtcactctgtgaacccacacacagacccctgaggagaggccacagaccctgaaatctgaaaggaaatggacacttgagtgggtaattcctcgagctgtgaggctctaagatgtaaccgggttccacttcgccatccacctcaaggtcctaaagatgacttaagaaagtgggaggtggccggtcccctaactcaccccttctactctccatggcctctcctgtgaggctctcccacgcctgagggaagacacaaggctggaagcagaacccggccccggccccaggaggccacacagcctcttgccccaatgccccatgagcttcccacagagaggacagcaggacagtaggtatgaatgcacctgaaaaagaatctcaaatgctacactcatgagagggtcattagcgatgccagtgacaggtgacataagaataatgggtcgagtcttgaggtgggctggaggggaaggagacacagggtgctcacgctgtccccccttcctcagctccaccaggtgctggttcagctccaggctggcgagaaggagcaggacttggcatcagctcccattcaggtctccatcagcgtccagctgtggcggctcccgggatgccacgagttcctggcagctctaggtaggcagagaatccttgacttaaatgggttcttgaattccatcttttaaatctctgtttttcctcctggtttctgttgggcaaagtatctcagtgtcttcttaaaatattatcttaaaacagttaactcaggctgggtacagtggctcacgcatgtaatcctagcactttgggaggctgagggggaggaacacttgaagccaggtgtttgagtccagcctgggcaacacagggagaccccatctctacaaaaattaaaaaaaattagccgggcatggtggtgcatgcctgtagtctcagttactcaggaggactgaggcagaggatctctctttttcttccaaaaaaaaattaacttagattccagtggtttagcaggattcccaaatggtacaaatggctttgtgccatttcctctgcactgtgatttcatctctgtcatttgtgcccattaccttaacatgaacctgctagactctagtattattggaggtcaagtgttattaggagctaaagaaaactaaaattagagtcataagatgataatggtttcagtgttgtcctctgtcaacgggtactcaaaactggcaggaaaacagtactattgaaaccacctctgagagaccatgggtacctaggactgcacatatggcaggggcctcagtcagtgcaggacactcgatttcccttttttaccatttgtaacgtgcaggtgtgactcctgacatattgctgtgtacctgtaatggtgcatctgttgatagaacacaagaggctgtgagccactcccctcctgccccacttaggggcccagtgactggctcgggaaccattcactccacaggtttcttttgaacacctgttatgtgtcaggcaatgttccaggcactggagatgcagcagtgagcaaaagactaaattcctaccatcctagagcttgcactctactgggagaacacgaacaaacctaatacagtgtctaagggacgccttaggaagccagggagcaccatggcaggcagaagcagatgggtgggagcagggccaggacaggcccacagagactgggatgtttgcaggagaaagtgccaggccgagggaacagccacggaggggtcggggcggggtagggggcagggcagatctgtgggctgtgatgccagggaaggcctttggattttaaactgagagaagtggacacccttgagaagatggcactgtctgacctcactgttacatggatgagctgtcagacatggcccgacagagaatccttaaaaatgcttctttcctgccgggtgcggtggctcactcctgtaatcccagcactttgggaggctgaggtgggtggatcacctgaggttgggagtttgagaccagcctgaccaacgtggagaaaccccgtctctactaaaaatacaaaaattagccaggcatggaggcgcatgcctgtagtcccagctactcaggaggctgaggcaggagaatcatttgaacccaggaggcggaggttgctgtgagccgagatcgcgccactgtactccagcctgggcgacaagagcaaaaagctctgtctcaaaaaaaaaaaaaaaaaaaaaaagcaagcttcttctcgctcggggtcccactgtctaacctgttttgtgggtgaccttccccgaccacctcagctcaaggctggctccttgtgttttcagacacgtcgtgtattgtgaaggtaaagtggggagctacagtgcctcacaggggttctgaatccccttggattagaagcttggcatcctttacaggttgcattacttggttttttatttttttttaactttttttgtagagattgggtttcaccattttgcccaagatggtctttttaaactcctgggttcaagcaaccctcccacacagcctcccaaagtgctgggattcaggtgtgagccactgctcctggcctacatgcttttcttctgtgggtttaaagcatcattttcctggtgtaaacatagtaaatttctatgtaggcagcagcagatggacgctagactgagaagggctgggttcccatccgggatgcttctcttgtcacttctgtgagaagccatagggcaagccttggggggcactgccacgagtgagtcagcaagaggaagccacaaccacaacctttttttttttggagacagggtcttactctattacccaggctggggtgctggaatgcagtggcgcgagctcagctcactgcaatctccacctcccaagtagctgggacttgaggcatgcaccacccacgcccagctaatttttgtattttttgtagacacaggggttcgccatgttacccaggctgttctccagctcctgagctcaagtgatctgcctgcctcagcctcccaaagtgttgggattataggcgtgagccaccgcacctggccaagaccttgctttataaaggaaaagctctcttcctcatggagcctgaggctccctttggtgtgggggtggtggagccaggcttcctcccctgcacactccctgcttttgaggtccctttgccagatacatcaagaatagtacagaaggaaacccaaaaactcttaacacaggctgtctctggtgttgggattatgggggactttagttgatgttccagttattctctgtattttccaagagccactgatactcaaggggcgagtcggtctgcatgcatttgcaagctttatggccttttgacatacagctcggggaggagagtggtgtccggtaggcctgtcatctggagagaggtggctggctcgctcccagggctccaaggctccaagaaatgccccctttccagtcctcagcaataagcacacaccttcacaacccagcatgggctgtcagagatggagaggactcagttctgagcaaccccatttaaatcattttggtaaaagtagaggtttctaatggaagcattacattgatactattcattattggtttttaatgctgagttctctgattatgtcttcctgttgctttcaggggctgtttactttcaaattcagaggaaaatgtcccatagtgaccagaatgctcctctagtgaacctaattcctaagggaatgatagtctccagatccccgaatacaagtcaaaaggctggctgcctagatagagagacggaggggtttctcctttggtgaatgtgctgttgctgagtcacgacacatagcatgctgacagtaacatcgtgtactatgggcccccttactttaacactgtgaggtcagaggagagggtgtggcatcgtaggtacccagcactttgcagtgttgtcaggggagttcagtgatctacccagtgctctcaatgcagggaccagggattctgagtgaagattttcaatgctgaagactcttcaggccctaaattcttgctttgtggtccctgtctgtattagtctgttcttacattggtataaagataccattagagactgggtaatttataaagaaaggaagtttaattgactcacagttctgcattgctagggaggcctcaggaaacttacaatcatggcggaaggcgaaggagaagcaggcaccttcttcacaaggtggcaggagagacagcacaggagaaatgccagacacttatcaaacaaccagatctcgtgagaactccctcactatcatgcgaaccaatccaatcacctcccaccaggtccctccctcgacatccagggattacaacttgagatgagatttgagtggggacacagagccaaaccatatcatctgtggccatagcatctgcacttggcttctccccagggagacatacttgcaggtgtccctgtaatgtctcttaatgtgtctaagtaccacgtccacagtttgttagccagcctcttgctcaggaagctccatgccctgtgttacacctgctctgagtctcattagaatccttagaattagggagcagcacccctgggctttggcagaggcagagaagtcactgcagatcccccattgtcagcgatcacttcaaagcccacgggggcagacactgaacatgcatgaaggcattgtctttgcccttgagaaacttcacctcaccatgcaccagctttaaatactgctgtcaatgctgaatggagtggccagtttttgtcctggacagtctttatatagactgtacttctgtgaaaaaaaaatggaaaagaaaacatgtgagtgagccttactgagttctggtccatagtgctttccgtgaagggacagaggagagccaggcagtgagagccacacacacgccaaatgggggctgcgtagagtggatgttctgggtggggcagcccgacccctctgccacatgaccaacctctgtgcagacatggggaagccccaggcccaaatgcttgctgaagggccttgcaggcattccatgaagttgcacaaggagccctatagcgctcatgttcaagatctggaatcttcccgaaggaagcagatgcttatattctttgttcctctaggttttgatctctgtgaagttggtcaggaggaagtaatcctgaaaaccgggaagcaagctaatcgacggactgtgcacttcgcgctccagtccctgctgtctctgtttggtaagagcctgccctcagaccagttctccaccagggcctgccatgctctccctgggggccgacaccagcacatacattttgggaagcagaagaaaagtgaatcaacattttttgtgtatgtttgttagggaacagttagggactattcaggagcgggaaacaaaaactccctgctctcatggaacttgcaatgtatgaggtgctggcacgtgctcaagcagggcaagggactggaagtgagagggtggtggcagagcagacgggaacgcggcgacaggtgtgcctgtcctctgtggggccacagggcctgaccggagcggacactcaggtcatgtgggcctgggagatttccaggccctggggacacacccagcccgactgatgttcttaagggccaagctggctacagtgggaagagcaaatgctggcttggaaggtggttatggtttgcaggtggaaccaacggggtctgctgaaggtcatgacagatgggtcaaagtggtatcctgttttttatttggaagaactgccaaaatgggattgccctctgctgaggtcaggaaagtggcaggaggaatgggcttgagttccatctgggacacattcggtttggggatatccattaggcatccatgcaggcagctggtatgtgagtttggagttcaggggagaggttggcatggagacagaaacatgcatggcatcacccggggtgcatgcgggtcggaggggaagaggattgtgtcctgtgggcattccagggttcagagtgacaaggatgaggaggggcctgtggaggagggggtggtgagggcagggtgtgtctctctcactgcagaactgagcaatggactctggatttggcagagtggacctcattggtgacctttataagaatgatagggactaaaacctgaatggactaagttgagagaatgggggagaggcagtgtggagagcgagtgtcggtgatgccagagggacttgctgggatggagctggaaaggagggcaggagatgtcacagactgctcacatgccccagctgagcaaagggcccccaccccaggagcacggccagccctgctcagaggaaggcggatacagggtcatgctgcttaccctgaccccgcatgtgacagggagcagagtggagatgggccatggtgggtctggggtgggtgtggctgtgagctctcctagaatgattttgtccctatgttagatttactttttctaacaggaccatgtttttgaggattgtaagattaatatgagtagctcttgcataattctttgctagcttctatgcatataaagatgtcgtaaattttgaaagaaaaatcaaaaccatatagaattctaactgcccttggggcccttgtgttttgtgcttagattctactgagctacccaagcgcctcagccttgacagctcctcctccctcgagtctcttgcttctgctcagtctgtttccaacgccctgcccttgggttaccagcaaccccccttctctcccaccggtgcggacagcatcgcctcagatgccatctctgtgtacagtctgagctccattgcctcctcaatgagctttgtctccaaacccgagggtggatcagagggtggaggccccggaggacggcaggaccatgaccggtccaagaacgcttacctgcagagatccaccctgcctaggagccagctgcctccccagacccgccctgcaggcaacaaagatgaagaagaatatgaagggttttctatcatcagtaacgagcccttggcgacctaccaagaaaaccgaaacacatgcttctcaccagaccacaaacaaccccaacctgggacagccggaggcatgagagtctcggtgagctccaaagggagcatcagcactccaaattctccagtgaaaatgactctgattcccagccccaactcacccttccaaaaggtgggaaaactagcaagctcagatacaggagaatcagaccagtctagcacagaaacggacagtaccgtgaaatcccaagaagaaagcaacccaaaactggatccacaagagttagcccagaaaattctggaggagacacagagtcatctcattgcggtggagcgtcttcagaggagcggcggccaggtgagcaagagtaataaccctgaagacggcgttcaggcgcccagcagcactgctgtcttcagagcgtcagaaaccagtgcgttcagcaggcctgttctctcccatcagaagagtcagccatcaccagtcactgttaaaccaaagcccccagccaggagctcctccctgcccaaggtgagttccggatatagcagccccaccacctcagagatgtccatcaaagacagcccgagccagcacagtggccggccatcgcccggctgcgactcacagacttcccagctggaccagcctctctttaaactgaagtaccccagctctccttacagcgctcacatttccaaatcaccaaggaacatgtccccaagctccggccaccagtctcctgctggcagtgcaccctccccagctctctcctactcctcagctggatctgctcgctcaagtccagcagacgctcccgacatagacaaactgaaaatggcagccattgatgaaaaggtgcaggctgtccataacctgaagatgttctggcagagcacaccccagcattccacagggccaatgaagatcttccggggggctcctggcacgatgacttccaaaagggatgtcctcagtctgttgaatttgtcaccacggcacaataagaaggaggagggagtggataagcttgaactgaaggagctgtccctgcagcagcatgacggagctccaccgaaagcccctcccaacggacactggcgcaccgagaccacctcgctgggctcactgccgctgcccgccggccctcccgccacagcccccgcgcgccctttgaggcttccttctggaaatggctacaagttcctgtctccaggaagatttttcccttcttccaaatgctaaagcatcttttatacccactgactctgagcagcctgcagatgggggcctggcgtttgcttcagcccttccctgagtgcagtccccccacagccaccagcaccctcatgatgctgtgctctgcaggcgaggggcaccaccacgtccaaaggctgccacacacactggtggcttttctgggccacattcaccaaaagccaggacttctgtggggctggtacaggaggctcatggaatttcctacacacttcaccaaatgtttgtttacctttgaactccctgcttctcatctttgatatgattcttcaccaggattttgtacaaaaatgatcatggttctggggtggggagaggaaagggagcacatattttgctaagaggtatatatgcagtaccttttatacacagaaatacaaatagagctttttctaaggctttcggttgctggttgggggtgggatatatgaaatttcagttgaattctacaggaaagtgttatattagccaaaaacagaaaaatggtttttaaaatgccaatgatttgtaattaaattgtagcaattttggtctcatgatagtgtaatatctcagcaacaatgcaataattcacattgaaacagcgcttccattctgaactctgctctgcaaatgtcttttgggtcccgctgtcaaccaaacttgaattttcttaaaaaaaaaattatgtaactcttatccaggcattttagaactatgcaattgtgatttaaaatgcaactttgtgcttttaaaacattattgaccttttttgtatatggataaacaacttggttttattatcaatagtactttgcatttatagctattatttttaaaagctcaaaaagttttttaaaatgtcaaattttgaatagtcatcaataagtaattatcaagtttggaaggaaaggttgaaatgactccgtttccttataagcaaaaaaaaaaaaaaaaaaaaaaaaaaaatttccatggctaactagatttaaccagaatcccgccttccagctcctgttcccttttattagctgctgaattttattcccttttcccaactccaggtccctcagttgtcttatatctaaatcctttgccaggtcaccacaatcccagcacctgcctctgtgagctgcccccaggccctcaccttggccctggccagcctcctgtgctcctgctgtctgaaggactggcccctcccccactgctgaagccacacgtacagatcctaagcaacagggccttttgctgggacgtatgcctggattatggccaaccgggaagagagagatgtatcttaaaaagtggaggtggacttctcctacagctctgacggtaacttaaattgttgccagcttgaggcaagacaagggaatcatctagttaggggtaaccattaatttattttataaagaaaggaaatgctgaaagtcgtattagtactgagtttagttggagaatttagataagta

SEQ ID NO: 365 - DNA, 518 bp, Homo sapiens
atttccatggctaactagatttaaccagaatcccgccttccaggctcctgttcccttttattagctgctgaattttattcccttttcccaactccaggtccctcagttgtcttatatctaaatcctttgccaggtccccacaatcccagcacctgcctctgtgagctgcccccaggccctcaccttggccctggccagcctcctgtgctcctgctgtctgaaggactggcccctcccccactgctgaagccacacgtacagatcctaagcaacagggccttttgctgggacgtatgcctggattatggccaaccgggaagagagagatgtatcttaaaaagtggaggtggacttctcctacagctctgacggtaacttaaattgttgccagcttgaggcaagacaagggaatcatctagttaggggtaaccattaatttattttataaagaaaggaaatgctgaaagtcgtattagtactgagtttagttggagaatttagataagtaagtatctttt

SEQ ID NO: 366 - DNA, 2371 bp, Homo sapiens
gtcttattctagccctgatcccaacactgaaagcgaagtactttataaagaagccagcaattatgagggtttctttatgttagtaggggaaaaaatggtaataaaagtaccagtgtagcaagtgaagaccaaatttatagcactgtgcattagatagcaaaatcaggttcttaacaatgaaaagtaaacctcaagtttctaaatccatatgcagatggttaggctgtccctctcttagcaaatctctcagcctccttctttcccaagtgccaaggatccctggagtaaagctctggggtctgtgctctctttctgtgaggggaaggctgcggccctatttgcccctctctagcaaacacccccaccaccctgccgcttcctgtggttattgagccagctaggagttactcatggactctaacctggttttagtcccatgtacatcgttgttttaggtttcatactgaagagccaatggtttatgtggttttattctgtcttaaatataagtttcaaggaagggaaaacaaaagtgataaaatgatagaacagtctagaggccactgtaaagtcaccgccactttacgtgtatgtcagtcttggtgttcttgtatgagtaaaatggatgtaaaatcataaaatcacagtgaatgtttcaggctacactggaaaaagtatgcacttagaattaaaggaaattgtataattcaccaagatttctttgtgtagatcaggggttggcaactatgacccacaggctaagactggtcagcggtctggtttttcacagccatgagctaagttacctttttaaagggttatataagtaattacatcatatttttgattttgcctttggcccacaccacataaaatattcaatacctggccttttttttttttttgagacagagtctcgctctgtcacccaggatagagtgcactggtgcgattttggctcactgcaacctcttcctcctgggttcaagcaattctccctgcctcagcctctaagtagctgggactacaggcacccactaccatgccttgctaatttttgtatttttaatagagatggggtttcaccatgttggccaggctggtctcgaactcctgacctcaggggatccgcccgccttggcctcccaaactgctgggattacaggtgagccactgcgcccagccaatacctggccttttaagaagtttgctgactcctggtatggatgacagaaaatggaataacgttttgtttctccagtctaggaaaagcaagtcaggtagtggatagactgactggcgtccggggagcccagggtatgtgagggccacgtggatggaagcaaatgcctcctgcatagcccttggctctttgtcccacttgggaggagtccatggatgtaatatttacaaaacaattttttccttaccatttgcagaaagcattgcatatatttccttttagctcaggaaactggcatgccccaccctctgctactccatcagatgtaaatacaatgactataagccgtacaactcccctctcttagaaacctcagcaggaccacagagcaagggagtcaaagctttcttaattctctccagtaaatgactcaactaatttgatttttttaattaagtcaaaatatcaagagaaaaattgctactaaaacttacattttgatccacactgatgtgcaacacaaaatgaaagttttcacctccattccattttttaaaaattcacggtccacactgaaacttgctgggttttagcaggagacaaaggtgtcacccacgctgtcctcatcctgctctctctgtcccagtgacgctccagcatatgatcactgcagccggtccctggcccgtgccgattctgccacctcccagccacacacatttgcagacccacaagaagaactgtagccttgataatttcagttcaggctggaaaaatgccatgcaataatctggtttgctttcagtaagtaggcaacaagtgaaaactgtataattttcatcacctattctgctgttctatctaaaatgagtgtacctgtggtttgtgaactgggcccttgtttgtgccagatccttcaaagatgttccctgtcaggacacctgtggccctgcccctcctcagacaccttcccactggcattcacgttccttatatgcagtgttagccatctttggcctacgtggactttttttgtaaattacaccatttccagacattaaactttttatattatgaaatttaccatgtaaaaagaacttcatatttttattgagattgctaaggcacttggccttcctcctttgtgattttcagtgtctattaaagcatgagttccctcagttttaa

SEQ ID NO: 367 - DNA, 929 bp, Homo sapiens
aagaccagccctggcccaccccacatcttcctagcccagtgccagcctggggcccatgcagcgtgggtgaacagttatgccacagccaagctccttccaaatctgccacggaccccagggcctccttgcaggctggttgctgcacagcctagctccatccatggttaagatggaggaccgggggcagcgtcgatgcagcctgggagtgagcatgtctcctgggccgtgcaaacttcttgcccgtgggttgggcctgaacagggccctctagaaccctggcacctgggcctgggcatggtagctctacatgcacttctgaggatagagtcacacatatttctgaagcttagggtctcctcaggcctgaaagtagtcagtatgtgaacactgtgaccagcaagcccccagcgtgcccccagttggctcgaggaggccaacacccagggtgctgggaggccctctccactgttaccctgtatctggaaactgtctggagcctttcagttctcgggtcccgtcacccccgaagtccctccgtccttgctgccactacacactgcttttttggggaaatggaactgccttctctacccattagtcacctcctcccaggccaggcctctcagctgcccctacatggccttgaggcccctcaggcccacttaagggtttcctctttttccttggtattatcttctggggtgggtgtgggggccatgggtcaagttccccagcccctaccttctaactcctcctggatactccttgacccagtgggcagtgtgccttggaggccccccgctcctgagggacagccagggctgatcgtctgtcctcccaggcaggcttgtttcctcctggctggtgtgagtacacacttcctcctgtctgggatgcctgagctccggcatcccagtgtttactgtaaa

SEQ ID NO: 368 - DNA, 2372 bp, Homo sapiens
gtcttattctagccctgatcccaacactgaaagcgaagtactttataaagaagccagcaattatgagggtttctttatgttagtaggggaaaaaatggtaataaaagtaccagtgtagcaagtgaagaccaaatttatagcactgtgcattagatagcaaaatcaggttcttaacaatgaaaagtaaacctcaagtttctaaatccatatgcagatggttaggctgtccctctcttagcaaatctctcagcctccttctttcccaagtgccaaggatccctggagtaaagctctggggtctgtgctctctttctgtgaggggaaggctgcggccctatttgcccctctctagcaaacacccccaccaccctgccgcttcctgtggttattgagccagctaggagttactcatggactctaacctggttttagtcccatgtacatcgttgttttaggtttcatactgaagagccaatggtttatgtggttttattctgtcttaaatataagtttcaaggaagggaaaacaaaagtgataaaatgatagaacagtctagaggccactgtaaagtcaccgccactttacgtgtatgtcagtcttggtgttcttgtatgagtaaaatggatgtaaaatcataaaatcacagtgaatgtttcaggctacactggaaaaagtatgcacttagaattaaaggaaattgtataattcaccaagatttctttgtgtagatcaggggttggcaactatgacccacaggctaagactggtcagcggtctggtttttcacagccatgagctaagttacctttttaaagggttatataagtaattacatcatatttttgattttgcctttggcccacaccacataaaatattcaatacctggcctttttttttttttttgagacagagtctcgctctgtcacccaggatagagtgcactggtgcgattttggctcactgcaacctcttcctcctgggttcaagcaattctccctgcctcagcctctaagtagctgggactacaggcacccactaccatgccttgctaatttttgtatttttaatagagatggggtttcaccatgttggccaggctggtctcgaactcctgacctcaggggatccgcccgccttggcctcccaaactgctgggattacaggtgagccactgcgcccagccaatacctggccttttaagaagtttgctgactcctggtatggatgacagaaaatggaataacgttttgtttctccagtctaggaaaagcaagtcaggtagtggatagactgactggcgtccggggagcccagggtatgtgagggccacgtggatggaagcaaatgcctcctgcatagcccttggctctttgtcccacttgggaggagtccatggatgtaatatttacaaaacaattttttccttaccatttgcagaaagcattgcatatatttccttttagctcaggaaactggcatgccccaccctctgctactccatcagatgtaaatacaatgactataagccgtacaactcccctctcttagaaacctcagcaggaccacagagcaagggagtcaaagctttcttaattctctccagtaaatgactcaactaatttgatttttttaattaagtcaaaatatcaagagaaaaattgctactaaaacttacattttgatccacactgatgtgcaacacaaaatgaaagttttcacctccattccattttttaaaaattcacggtccacactgaaacttgctgggttttagcaggagacaaaggtgtcacccacgctgtcctcatcctgctctctctgtcccagtgacgctccagcatatgatcactgcagccggtccctggcccgtgccgattctgccacctcccagccacacacatttgcagacccacaagaagaactgtagccttgataatttcagttcaggctggaaaaatgccatgcaataatctggtttgctttcagtaagtaggcaacaagtgaaaactgtataattttcatcacctattctgctgttctatctaaaatgagtgtacctgtggtttgtgaactgggcccttgtttgtgccagatccttcaaagatgttccctgtcaggacacctgtggccctgcccctcctcagacaccttcccactggcattcacgttccttatatgcagtgttagccatctttggcctacgtggactttttttgtaaattacaccatttccagacattaaactttttatattatgaaatttaccatgtaaaaagaacttcatatttttattgagattgctaaggcacttggccttcctcctttgtgattttcagtgtctattaaagcatgagttccctcagttttaa

SEQ ID NO: 369 - DNA, 11374 bp, Homo sapiens
aaactcatcactgcctccgagacgggcgagcagctcatcagccgggtaagtcgagcctggagggctgagccagggcctgaggcccatgctgatttggaaaggcagagcaacttggccctaaataggaacctgtaagtgaatgcagtctcaccgcctttgtgattcaaaggagaaggtgagggccgggagtaagagaatagccctgcctggcaagtgctgtttacctgctgtttccatctgcgatgccaaggcatccgtgccagcggcactgccccttaccggcatgatgggaggtcgtaccagcagacactggctgctattggcattgtcatgggcagctgtggccctgatgaagctgtgcggccaaccccagggtgaagctgggtgcttgactcagaggggcacagaggggcaggtttgcatagtgttctcatatgtgctgagcatccagggccttcagaggatgcttatggggcccctgtcacctgtggtctcagggcatttcctgaaatctccactcggtggtctcctgaaccttgtcctcctcaccacccactttttcagctgattgacgagtgttacagccaccctccccaagccaccaggtgtggggccagcccaccaggatggctgcaggtgttcccacgcttctttgatcaaagtacttaaccatgcctgaaacaagatagtcaccaaggcaaagcagtgaacccaggagcaactctcatgcaagacactgcttagcagatgtgctttcttttaggaaaatacagatctagttcaggagttcggcgggttccagttcttagcatcatgtaggtcctttgcagcttggcctgggagcttctcagtacccatgctgcaccactgcgttctggccagtgagggtctggaccaagcccctggggggacagctgtgggagcacttctggaggctggagcagcccttgaagagcacagagttgcttttctggccattttggagtgtaacaatttgaaaaagtaatatatgttgttattagagatatttgccagcaaatttcactgaagtggaaatatttctatggagaaataaagctgctccatctactattagcctctgaaacacactgagtgctacctagggctgtttccacctggatttggaacttagaaccaacagtgacctgtccccttggctgagtccctgctcattttgtaataagtgtattaacgcctgctcgttgaatagcatcaggaagacacttccagaacactgcatattaaagcatcctgaacccaggcggtctagaggtctgtgttctacaaaatctgaaagccaaaattatactccatttgcaaggctgtgctgagaggccaaaaagccagttgcttaatttcttgcttttgatgggagcacagggactttctgcctgatacgctgttgggccctagggacatgtcccgaggctgcccccagtggtggcagctggtggacctttcctggctcactcaggaaccagggactttggtttcctgagctggctacaaacgcccgctgtgctctttccctcccgagcctctactggctgggaagggaggcctggctgatgctgcccctgagcccctggatccgcacgcggctggcctgggtgtggctgtccgttctcctgtgtgtcccctgctgactcttgctcctctcccctcccagtcagagccgcgggcctggtgtggcgcttcctaaacagtgatcagctcatgttgcataacagcctgtgcttgagtctaaactctcttctttctctctttctttctttttcttataatctgctggccgaaggctgttaaaaatatggttggaatggtgagtactactttaagtagcaactgttgtcaggtgagcccctcaacccacccacccccgagttcccctgggcaggctctgagctcggggtgcacgtgctgtcaaacggagccacacgggctgcggcgcccccgcgggtgcgcactgctgctggactggcggcccgtccccttctctgctctgcctcccctcttcctgctccgcccttcttgcgtccttgatttgacctcctgaggtccaccagacagcaggggcagaaccagctttcagtgagtgtcactctgtgaacccacacacagacccctgaggagaggccacagaccctgaaatctgaaaggaaatggacacttgagtgggtaattcctcgagctgtgaggctctaagatgtaaccgggttccacttcgccatccacctcaaggtcctaaagatgacttaagaaagtgggaggtggccggtcccctaactcaccccttctactctccatggcctctcctgtgaggctctcccacgcctgagggaagacacaaggctggaagcagaacccggccccggccccaggaggccacacagcctcttgccccaatgccccatgagcttcccacagagaggacagcaggacagtaggtatgaatgcacctgaaaaagaatctcaaatgctacactcatgagagggtcattagcgatgccagtgacaggtgacataagaataatgggtcgagtcttgaggtgggctggaggggaaggagacacagggtgctcacgctgtccccccttcctcagctccaccaggtgctggttcagctccaggctggcgagaaggagcaggacttggcatcagctcccattcaggtctccatcagcgtccagctgtggcggctcccgggatgccacgagttcctggcagctctaggtaggcagagaatccttgacttaaatgggttcttgaattccatcttttaaatctctgtttttcctcctggtttctgttgggcaaagtatctcagtgtcttcttaaaatattatcttaaaacagttaactcaggctgggtacagtggctcacgcatgtaatcctagcactttgggaggctgagggggaggaacacttgaagccaggtgtttgagtccagcctgggcaacacagggagaccccatctctacaaaaattaaaaaaaattagccgggcatggtggtgcatgcctgtagtctcagttactcaggaggactgaggcagaggatctctctttttcttccaaaaaaaaattaacttagattccagtggtttagcaggattcccaaatggtacaaatggctttgtgccatttcctctgcactgtgatttcatctctgtcatttgtgcccattaccttaacatgaacctgctagactctagtattattggaggtcaagtgttattaggagctaaagaaaactaaaattagagtcataagatgataatggtttcagtgttgtcctctgtcaacgggtactcaaaactggcaggaaaacagtactattgaaaccacctctgagagaccatgggtacctaggactgcacatagcaggggcctcagtcagtgcaggacactcgatttcccttttttaccatttgtaacgtgcaggtgtgactcctgacatattgctgtgtacctgtaatggtgcatctgttgatagaacacaagaggctgtgagccactcccctcctgccccacttaggggcccagtgactggctcgggaaccattcactccacaggtttcttttgaacacctgttatgtgtcaggcaatgttccaggcactggagatgcagcagtgagcaaaagactaaattcctaccatcctagagcttgcactctactgggagaacacgaacaaacctaatacagtgtctaagggacgccttaggaagccagggagcaccatggcaggcagaagcagatgggtgggagcagggccaggacaggcccacagagactgggatgtttgcaggagaaagtgccaggccgagggaacagccacggaggggtcggggcggggtagggggcagggcagatctgtgggctgtgatgccagggaaggcctttggattttaaactgagagaagtggacacccttgagaagatggcactgtctgacctcactgttacatggatgagctgtcagacatggcccgacagagaatccttaaaaatgcttctttcctgccgggtgcggtggctcactcctgtaatcccagcactttgggaggctgaggtgggtggatcacctgaggttgggagtttgagaccagcctgaccaacgtggagaaaccccgtctctactaaaaatacaaaaattagccaggcatggaggcgcatgcctgtagtcccagctactcaggaggctgaggcaggagaatcatttgaacccaggaggcggaggttgctgtgagccgagatcgcgccactgtactccagcctgggcgacaagagcaaaaagctctgtctcaaaaaaaaaaaaaaaaaaaaagcaagcttcttctcgctcggggtcccactgtctaacctgttttgtgggtgaccttccccgaccacctcagctcaaggctggctccttgtgttttcagacacgtcgtgtattgtgaaggtaaagtggggagctacagtgcctcacaggggttctgaatccccttggattagaagcttggcatcctttacaggttgcattacttggttttttatttttttttaactttttttgtagagattgggtttcaccattttgcccaagatggtctttttaaactcctgggttcaagcaaccctcccacacagcctcccaaagtgctgggattcaggtgtgagccactgctcctggcctacatgcttttcttctgtgggtttaaagcatcattttcctggtgtaaacatagtaaatttctatgtaggcagcagcagatggacgctagactgagaagggctgggttcccatccgggatgcttctcttgtcacttctgtgagaagccatagggcaagccttggggggcactgccacgagtgagtcagcaagaggaagccacaaccacaacctttttttttttggagacagggtcttactctattacccaggctggggtgctggaatgcagtggcgcgagctcagctcactgcaatctccacctcccaagtagctgggacttgaggcatgcaccacccacgcccagctaatttttgtattttttgtagacacaggggttcgccatgttacccaggctgttctccagctcctgagctcaagtgatctgcctgcctcagcctcccaaagtgttgggattataggcgtgagccaccgcacctggccaagaccttgctttataaaggaaaagctctcttcctcatggagcctgaggctccctttggtgtgggggtggtggagccaggcttcctcccctgcacactccctgcttttgaggtccctttgccagatacatcaagaatagtacagaaggaaacccaaaaactcttaacacaggctgtctctggtgttgggattatgggggactttagttgatgttccagttattctctgtattttccaagagccactgatactcaaggggcgagtcggtctgcatgcatttgcaagctttatggccttttgacatacagctcggggaggagagtggtgtccggtaggcctgtcatctggagagaggtggctggctcgctcccagggctccaaggctccaagaaatgccccctttccagtcctcagcaataagcacacaccttcacaacccagcatgggctgtcagagatggagaggactcagttctgagcaaccccatttaaatcattttggtaaaagtagaggtttctaatggaagcattacattgatactattcattattggtttttaatgctgagttctctgattatgtcttcctgttgctttcaggggctgtttactttcaaattcagaggaaaatgtcccatagtgaccagaatgctcctctagtgaacctaattcctaagggaatgatagtctccagatccccgaatacaagtcaaaaggctggctgcctagatagagagacggaggggtttctcctttggtgaatgtgctgttgctgagtcacgacacatagcatgctgacagtaacatcgtgtactatgggcccccttactttaacactgtgaggtcagaggagagggtgtggcatcgtaggtacccagcactttgcagtgttgtcaggggagttcagtgatctacccagtgctctcaatgcagggaccagggattctgagtgaagattttcaatgctgaagactcttcaggccctaaattcttgctttgtggtccctgtctgtattagtctgttcttacattggtataaagataccattcgagactgggtaatttataaagaaaggaagtttaattgactcacagttctgcattgctagggaggcctcaggaaacttacaatcatggcggaaggcgaaggagaagcaggcaccttcttcacaaggtggcaggagagacagcacaggagaaatgccagacacttatcaaacaaccagatctcgtgagaactccctcactatcatgcgaaccaatccaatcacctcccaccaggtccctccctcgacatccagggattacaacttgagatgagatttgagtggggacacagagccaaaccatatcatctgtggccatagcatctgcacttggcttctccccagggagacatacttgcaggtgtccctgtaatgtctcttaatgtgtctaagtaccacgtccacagtttgttagccagcctcttgctcaggaagctccatgccctgtgttacacctgctctgagtctcattagaatccttagaattagggagcagcacccctgggctttggcagaggcagagaagtcactgcagatcccccattgtcagcgatcatttcaaagcccacgggggcagacactgaacatgcatgaaggcattgtctttgcccttgagaaacttcacctcaccatgcaccagctttaaatactgctgtcaatgctgaatggagtggccagtttttgtcctggacagtctttatatagactgtacttctgtgaaaaaaaaatggaaaagaaaacatgtgagtgagccttactgagttctggtccatagtgctttccgtgaagggacagaggagagccaggcagtgagagccacacacacgccaaatgggggctgcgtagagtggatgttctgggtggggcagcccgacccctctgccacatgaccaacctctgtgcagacatggggaagccccaggcccaaatgcttgctgaagggccttgcaggcattccatgaagttgcacaaggagccctatagcgctcatgttcaagatctggaatcttcccgaaggaagcagatgcttatattctttgttcctctaggttttgatctctgtgaagttggtcaggaggaagtaatcctgaaaaccgggaagcaagctaatcgacggactgtgcacttcgcgctccagtccctgctgtctctgtttggtaagagcctgccctcagaccagttctccaccagggcctgccatgctctccctgggggccgacaccagcacatacattttgggaagcagaagaaaagtgaatcaacattttttgtgtatgtttgttagggaacagttagggactattcaggagcaggaaacaaaaactccctgctctcatggaacttgcaatgtatgaggtgctggcacgtgctcaagcagggcaagggactggaagtgagagggtggtggcagagcagacgggaacgcggcgacaggtgtgcctgtcctctgtggggccacagggcctgaccggagcggacactcaggtcatgtgggcctgggagatttccaggccctggggacacacccagcccgactgatgttcttaagggccaagctggctacagtgggaagagcaaatgctggcttggaaggtggttatggtttgcaggtggaaccaacggagtctgctgaaggtcatgacagatgggtcaaagtggtatcctgttttttatttggaagaactgccaaaatgggattgccctctgctgaggtcaggaaagtggcaggaggaatgggcttgagttccatctgggacacattcggtttggggatatccattaggcatccatgcaggcagctggtacgtgagtttggagttcaggggagaggttggcatggagacagaaacatgcatggcatcacccggggtgcatgcgggtcggaggggaagaggattgtgtcctgtgggcattccagggttcagagtgacaaggatgaggaggggcctgtggaggagggggtggtgagggcagggtgtgtctctctcactgcagaactgagcaatggactctggatttggcagtgtggacctcattggtgacctttataagaatgatagggactaaaacctgaatggactaagttgagagaatgggggagaggcagtgtggagagcgagtgtcggtgatgccagagggacttgctgggatggagctggaaaggagggcaggagatgtcacagactgctcacatgccccagctgagcaaagggcccccaccccaggagcacggccagccctgctcagaggaaggcggatacagggtcatgctgcttaccctgaccccgcatgtgacagggagcagagtggagatgggccatggtgggtctggggtgggtgtggctgtgagctctcctagaatgattttgtccctatgttagatttactttttctaacaggaccatgtttttgaggattgtaagattaatatgagtagctcttgcataattctttgctagcttctatgcatataaagatgtcgtaaattttgaaagaaaaatcaaaaccatatagaattctaactgtccttggggcccttgtgttttgtgcttagattctactgagctacccaagcgcctcagccttgacagctcctcctccctcgagtctcttgcttctgctcagtctgtttccaacgccctgcccttgggttaccagcaaccccccttctctcccaccggtgcggacagcatcgcctcagatgccatctctgtgtacagtctgagctccattgcctcctcaatgagctttgtctccaaacccgagggtggatcagagggtggaggccccggaggacggcaggaccatgaccggtccaagaacgcttacctgcagagatccaccctgcctaggagccagctgcctccccagacccgccctgcaggcaacaaagatgaagaagaatatgaagggttttctatcatcagtaacgagcccttggcgacctaccaagaaaaccgaaacacatgcttctcaccagaccacaaacaaccccaacctgggacagccggaggcatgagagtctcggtgagctccaaagggagcatcagcactccaaattctccagtgaaaatgactctgattcccagccccaactcacccttccaaaaggtgggaaaactagcaagctcagatacaggagaatcagaccagtctagcacagaaacggacagtaccgtgaaatcccaagaagaaagcaacccaaaactggatccacaagagttagcccagaaaattctggaggagacacagagtcatctcattgcggtggagcgtcttcagaggagcggcggccaggtgagcaagagtaataaccctgaagacggcgttcaggcgcccagcagcactgctgtcttcagagcgtcagaaaccagtgcgttcagcaggcctgttctctcccatcagaagagtcagccatcaccagtcactgttaaaccaaagcccccagccaggagctcctccctgcccaaggtgagttccggatatagcagccccaccacctcagagatgtccatcaaagacagcccgagccagcacagtggccggccatcgcccggctgcgactcacagacttcccagctggaccagcctctctttaaactgaagtaccccagctctccttacagcgctcacatttccaaatcaccaaggaacatgtccccaagctccggccaccagtctcctgctggcagtgcaccctccccagctctctcctactcctcagctggatctgctcgctcaagtccagcagacgctcccgacatagacaaactgaaaatggcagccattgatgaaaaggtgcaggctgtccataacctgaagatgttctggcagagcacaccccagcattccacagggccaatgaagatcttccggggggctcctggcacgatgacttccaaaagggatgtcctcagtctgttgaatttgtcaccacggcacaataagaaggaggagggagtggataagcttgaactgaaggagctgtccctgcagcagcatgacggagctccaccgaaagcccctcccaacggacactggcgcaccgagaccacctcgctgggctcactgccgctgcccgccggccctcccgccacagcccccgcgcgccctttgaggcttccttctggaaatggctacaagttcctgtctccaggaagatttttcccttcttccaaatgctaaagcatcttttatacccactgactctgagcagcctgcagatgggggcctggcgtttgcttcagcccttccctgagtgcagtccccccacagccaccagcaccctcatgatgctgtgctctgcaggcgaggggcaccaccacgtccaaaggctgccacacacactggtggcttttctgggccacattcaccaaaagccaggacttctgtggggctggtacaggaggctcatggaatttcctacacacttcaccaaatgtttgtttacctttgaactccctgcttctcatctttgatatgattcttcaccaggattttgtacaaaaatgatcatggttctggggtggggagaggaaagggagcacatattttgctaagaggtatatatgcagtaccttttatacacagaaatacaaatagagctttttctaaggctttcggttgctggttgggggtgggatatatgaaatttcagttgaattctacaggaaagtgttatattagccaaaaacagaaaaatggtttttaaaatgccaatgatttgtaattaaattgtagcaattttggtctcatgatagtgtaatatctcagcaacaatgcaataattcacattgaaacagcgcttccattctgaactctgctctgcaaatgtcttttgggtcccgctgtcaaccaaacttgaattttcttaaaaaaaaaattatgtaactcttatccaggcattttagaactatgcaattgtgatttaaaatgcaactttgtgcttttaaaacattattgaccttttttgtatatggataaacaacttggttttattatcaatagtactttgcatttatagctattatttttaaaagctcaaaaagttttttaaaatgtcaaattttgaatagtcatcaataagtaattatcaagtttggaaggaaaggttgaaatgactccgtttccttataagcaaaaaaaaaa

SEQ ID NO: 370 - DNA, 16225 bp, Homo sapiens
gaagctgagtctgatagaacttagcccgtgaccttaatgggtactcggcagatgcagctgcctggctgattagagaacaggacaggcatggaccctgctttcggagcagtgctgtggaatagaactttgtgcagtgacggaaatgttctgcatcttcactctcccttatgatggtcagtagccacgtgtgaaatgtatctaatgggactgagaaactaaatttttaatttaagtagccacaggtagctagtgattaccatagcaaatgctgcagttccccaggtttttagtcttgattatacctcccagaagtcgtctgctccaaaggtcaacagttcagcaggaagcagagcccatgcctttgagaggctggaggtattgcatactcccaaaaatcccaggggctcactcataatgagcccaacagtgcagaagagttctgggctgttgtttctaaaatgcaagcatacagccttcctcctctcccattttcatttagacctgtactaacagaattctggcattacaaattgttttgtattttgatgtcttcagaataaatatataatgtgcttcataattgaaagcaattttgatggttttaaaatcaacattttttgtgttgctaccttgtgctgagacttgtgctagatagtgaggataccaagaaaaataagcacagggattttgtgttgttcatctttatctcctcagcatctaagataatacccaatgcatagtgggctctcagtagtgtttggtgaactaataagcgaaagatataatcgccactgtcaaagcactcactcactatgtggtgggggccaacagacaggtacagatgtgttcctggtgtggagaaagtgccagggtggctcagcgaagaaaaaagaattcttgtggtgctatcaagcaaggcttcatttgagggaaaagtaggatttctgtaggtggaaaaagagaagacattgatttgaaactccctggttgttttataaacttcatattagctatgtccacagagcctccaaaaggatataattcaaaagggattttaaccaaaatgaaatatgttgtgactaatagatacagtttatttgaatgaatgatagtttttcccatttgatattttaactgtgctacacaagaatgagagtagacatagctcgatttgtagtctcattgttctgtcttttctgcccatttcagtgacccaggactctttgtttattgctgtgatttttcttccacagctatagaactggtccaggtgagtacaatgggaaattacctattggtaatttccactgattaaagggaaaaggttctcctaaaaatcaaggtctctggctgtgttcttatacagtctgtgttcttacggtctaaaagtaaaagatttactgataacgagcataccttgttttattgcagttcactttatcacactgtatagatgtcgtatctgttcatatattgaaagtttgtggcaaccctgcatcaagcaagcctaccggtgccatttctccaccaccatatgctcacttagtatctatgtgtcatgctttggtgattctcagaatatttcagacttttttactgttatgtatgttatagtgtgtgatgttactgttgtacttggtttggggttccacaaatcacatctgtgtaagacggtcaacttaataaatgcatgcgttgtgactgctccaccaacctgccattccatttctctccctctcctcaggtctccttgttctctaagacacaatattgcaattaggccacttcatactctacagtgtcctctgtgtgttcaagtgaaaggaagagtttcaccacgttgcccaggctggtctcgaatgatagcttacacttgtgttgtaattattaaatttaatacacaattgcataaactaatgaaatacgattgcatgctggtgcggtgactcatgcctgtaatcccagcactttgggaggccggggtgggcagatcacgaggtcaggagttcaagaccagcctgaccaagtgaaaccctgtctctactaaaaatacaaaaaaattagccgggctaaaaatacaaaaaatggcgcatacctgtaatttcagctactcaggaggctgaggcaggagaatcacttgaactcaggaggtggaggttgcagtgagctgagatcgcgccactgcactccagctagacaacagagtgagactccatctcaaaaaaataaaaatacattattggtcggccacaatggcttaatgcctgtcatcccaacactttgggaggctgaggcagacagatcacttgagatcaggagttcaagactggcctaggcaacatggtgaaaccccatctctactaaagaaaaatacaagaaattatccaggcatggtggtgggcacctgtagtcccagctactcaaaaggctgaagcaggagaatcgcttgaactggggaggcaaaggttgcagtcagccaagattgtgccactgcactccagtctgggcgacagtgagactccatctcaaaaaaaagagagagaaagaaaaaaaaatagtttattgctaaaacatgttaataatcatctaaaccttcagcaagttgtaatctttgctagtggacggtcttgccttgatattgatggctgctgactgatcagggtggtgattgccaagggttggggtggtcgttgctaagggctggggtgactggcaatttcttaaaataaggtaacagtgaagtttaccgtatcatttggctcttcctttcatgaaagatttctccgtagcatgcgatgctgataggattttgcccacagtagagcttctttcaaattgaagtccattctctcaaaccctgctgctgctttatcaactaagtttgatgccatttcaaaacaaaaaacctttcttgccatttctaaacaatgttcatagcatctttactggagtagatttgatctcaataaaccactttctttgcccaaccgtaagaagcaactccttatagataaggatgctggtttaaaaagaaagaaagaaagaaagaataagactaaaaaacaagcagcaacaagattgcagcaattcagtcacatcttcaggcttcactttttttttttttttttttttgagacagggtctcactgtgttgcccaggctgaagtagagtgacacaatcatagcccactgtagccttgaattttgggctcaggcgaacctgatgagatgattccattggggttctttgagttacaagtaacagaaacgtctagacaaactcaaagcaataaagtagaatgtcatagaacctaagggcacaaaatacagccccaagttcctggtatcttacctgtcattgtccagggcccatttgttttttccctctttgcataccagttttctctagtcagtatttcctaattttgcacgcggccccaacgtgcttgctcctcccagtcccttacaagctcaccctgttcaggggttcatggtgcctcactaaaatgattgtgtcccagttctgaagtccctggaaagtctagttaacacaacctagctgataaatacagcagccctgtttgaatcagctttggccaatgagaaacaaactcacatatttgcagaagacggacattgagggtagatgccttaaaatgtatctgttatggctggggtcagtggctcacacctgtcatcccagcactttgggaggccaaggccagcggatcacgaggtcaggagttcgataccatcctgaccaatatggtgaaaccccgtctctactaaaaatgtgaaatttagctgggtttggtggcacgcacctgttgtcccagctacttgggaggctgaagcagaagaatcgcttgaacccaggaggcggaggttgcagtgagccgagatcgcaccactgcactccagcctgggtgacagagcaagactccatctcaaaaaaaaaaaaatgtgtctgttacaattggccgggcatggtggccagcactttgggaggctgaggtgggcagatcacttgaggtcaggagttcaagaccagcctggccaacatggtgaaaccctgtctctactttaaaaaacacaaaaactaggccgggtgcagtggttcatgcctgtaatcccagcactttgggaggctaagacgggcagatcatctgaggtcaagagttccagatcagcctggccaatatggtgaaactccatctctactaaaaatacaaaaattagccaggtatggtggtaggtgcctgtagtcccagctactcgggaggctgaggcaggagaatcgcttgaatctgggaggcagaggttgtagtgagccaagatcacgccattgcactccagcctgggctacaagagtgaaactccatctcaaaaaaaaaaaaaaaaatacaaaaactggcaggacgtggtggcatgcacctgtaatcccagctactggggaggctgaggcaggagaattgcttgaacctgggaagcagaggttgcagtgagccgagatcgcaccactccagcctgggcaacagaacaagactctgtttcaaaaaaaaaaaaaaaaaagagtctgtcacaattatgtacaatgctgttagggcagattaggaattggtagtgccatgcttttagaattattattcagttaaagaccaaatgaatattgaagcctacctttacttcagtttttgataacaaagtaaattttctacatctacagaaatagattttcctgaagaattctatggtttgtgtaatattttctagttgggagttgttttaaatcgtgtgctttgttgtttgttttgagacagggtctcagtcactcaggctggagtgcggtggtacaatcaaactcactgtggccttgatctcctgggctcaagtgattctcccacctcctgtgtaactgggactatgggcacatgccaccacacttggctaatttttttttttttttttttttttgcgacggagtctagctctgtcgcccaggctggagtgcagtggcgtgatcttggctcactgcaacctccgcctcccaggttcaagcgattctcctgcctcagcctccagagtagctgggattacaggcgggtgccactgcacccagctaatttttttgtatttttagtagagacggggtttcactgtgttggccaggctggttttgaactcctgacctcaggtaatcctcccacctcgacctcccaaagtgctaggattacaggcatgcacccggcatttttttattttttgtagagatgaagtctcactatgttgcctagctggtctcaaactcctgggctcaagtgatcctcctgcctcagcctcccagggtgctgggattctaggcgtgagccaccgtgcctagcagatcgtgcttttggtttgtttgtttgtttgtttttgtttttgtttttgagacggagtctccctctgtcgcccaggctggagtgcagtggtgccatctcagcttactgaaagctccgcctcccgggttcacgccattctcctgcctcagcctcccgagtagctgggactacaggcacctgccaccacgcccggctaattttttgtatttttagtggagacggggtttcaccatgttagccaggatggtctccatctcctgacctcatgatccgcctgcctcggcctcccaaagtgctgggattacaggcgtgaaccaccgcgtgcttatttaaagtatgtgctgtctctctccttacgaatgtttttttttccctgttggtcactcattttcatgatcgttttccaattcttagatctgacttcatgcatgagaagtacagaaagtacacaagaataaagaataaaagtaggggagtcaggaatgttctattttaaaagcaactattagattcctcactgtctcccttcaattattcctgatctttactctttgagtcctccctgaaataacatgctattagattgatgcaaaagtaattgtcgtttttgccgttactttttttttttttttcttttttttagatggagtttcactcttgttgcccaggctggagtgcaatggtgcaatctcggctcactgcaacctctgcctcctgggttcaagcgattctcctgcctcagcctcccgagtagctgggattataggcatgtgccaccacacccagctaattttgtatttttagtagagatggggtttctccatgttggtcaggctggcctcgaactcctgatcttaggtgatcctcccgccttggcctcccaaagtgctgggattacaggcatgagtctccacatccttgccattactttcaatagcaaaaaccgcaattactttttcaccaatctatataatgattagaaatatatcccctactctggagggtgaggcaagtgatcctatcgcgtgaacccaagagtttgaggccagcctgggcaacatggggagattttgcctcaagaaaaaaaagaaaaaagaaatatatccctctttgtgaagtagcaacagttacatttaaaatttaaaacaagataatcttttctttaggctatgttaatattttctaacttacctgtgtcttccatctgtctgcagacaaattcagaatatgatccttctcggtgttttgcctttgttcacgacctgtgtgatgaagagaagagttacccagtgcccaagggcagtcttgatattatcattctcatatttgttctttcagcaattgttccagacaagtaagtttgggtcccttggctggtagtgtcacaaaaaggaagctttggtgagggacctttttttttaaaataggttcttgctctgtcagcccaggctggagtgcagtggcacgatcatggctcactgcagccttaacctcttgggcttaaatgatcctccctcctcagcttcccaagtaggtgggaccacaggcacgtgccaccagtcctggccaatttttgtgtttttagcagagatggggttttgccatgttgcccagactggtcttgaattcctgggctcaagcgatcctcccaccttggcctcccaaagtgctgggattataggtgtgagccaccatgcccagcctggcgagggaccttgatattagagttgggctcaaagtaaaaagagttttgtttatgttctgatagacacaaagaagccacaccatttgtagtgatgtgagcatctcagccattttcctaaatttgtcttgatgtccaacttctgttctggcctcgaaacttctgcagtagttggttcttcatttccttgttgtggctcaacattgggaaagaatgggaaatcagtctctaatgagtatgtggggaaattcctattgatagtctcatcacatgccgttttagaactgtgaactgtgggtgtcacagctcttaggtaatgtctcattattggatttttattttattttattttatttttttgagatggagtcttgccctgtcgcctgggctggaatgcaatggcgtgatctaggctcattgcaacctccacctccccggttcacacaattctcctgcctcaacctcccgagtagctgggattacaggcacctgctaccatgcccagctaatttttgtatttttagtagatgcggggtttcaccatgttggccaggctggtcttaaactcctgaccttgtaatctgcttgcctcaaccttgcaaaatgctgggattacaggcatgagccactatgctggccttttttttttttttgaagacggagtcttgctctgttgccccggctggggtgcagtgatgagatcttggctcactgcaacctccacctcccgggttcaaccaattctcctgcctcagcctcccaagcagctgggattacaggtgtacgccaccatgcctggctaatttttgtattttttttttttagtagagatggtgtttcaccatgttggccaggctggtctcaaactcctgacctcatgacctcatgatccgcccgccacggcctcccaaagtgctggaattacaggcgtgagccaccacgcccagcctattggccttttaaatgctttaaataaaacaaccttattagcaacatgaaatttacattgaaccttaactaaggtgttctctgatgcttacagtgttttaggaaagtgtgatacagaattctataaaatcagattcagattaaaggaaagtcaaatgctatatcctaaaatacaccattaaaacttcatatgcataggtaaccagtggtcctgtgacactaccttctcttttttttttctgagatggagtctcactctgttgcccaggctggagtgcagtggtgagatttcagttcactgcaacctctgcctccaaggttaaagcgattctcctgcctcagcctcccgagcagctgggattacagacaagcaccaccacacctggctaatattttttgtatttttagtagagacggggtttcactatgttggccaggctggtcttgaactccttacctcaagttatccacccacctcggcatcccaaagtgctgggattacaggcatgagccactgcaacctgaccaaaactaccttctcaaggaagcagagtcagatggtggctcagagattcagataccattgactaattccatggaagcccttggcactgccagagtgcagtgagtctggacaggctgggggttggcacatgttagggtaaactatacccatgaaatcatgagattagagacttcaaacatctcctcattctgtgtcatcagagtcctgcaaaggatgattaagtaagttagtgttaaaggtcaaggtaagctggtgttaggaagccagattacatgactagagactgcagggaccagtgattgagatcctggtttatctcccagagtccaaggacccctcactggctgcacaggataggagctttgggtgattgaccttcctctagaaggccacacttcctctagaagggtactgaagtcatccaacctgagaggatgagtgtgaaataaaggcatatgcaggataacccaaaaggcctaccatggttttaaactttaataattgcagaggttgaccaggcacagtggctcacgcctataatcccaccactttgggaggctgaggtgggaggagtgcttgaagccaggagctcaagaccagcttgggcaacaaagcaggaccgttatctctactaaaaataaaaataaaaaaatttagccaggtgcatatctgtagtcccagctactcagaaggctgaggcaggagtatggcttaagcccaggagtttgaggctgcagtgaagtgagctacgatcacaccactgcactgcagcctgggtgacagagtgagaccctgtctcaaaaaaaacctatgaccttagaagtttcaatgctacaaactttttaaaaattgacatggactaaaacaaattattaaaatttaaaattcaagccagacacagtggcacacacttttagtcccagctacctagagactgaggcaggaggatcacttgagcccaagagtccagccgaggcaacatagcatagcaggaccccagctgttttttgtttgtttgtttgttttctgagatggagtttcactcttgttgcccaggctggagtgcagtgctatggtcttggctcactgcaatctccgcctcccaggttcaagcgattctcctgcctcagcctcccaagtagctaggattacaggtgcctgccaccatccctggctaatttttttgtatttttagtagagacagggtttcaccatgttggccaggctggtctcgaactcctgacctcaggtgatctgcctgccttggccgtttttttgttttttggttttttttaagagggaaacattcattatgcaaaatttaaatagactttgaaatttttttggtgaagtttgtagcatttagacttctgaagttatgaaagcttcaacctgcaccaagacttttgaagaacactgcatatggaaaacacagacctaagtgtaaaaccctctgtctgttatactcatttgcatactgattgtattgtaagttcttgaggacaagtcttcatttaacaaacagaaagatacagcccctacattgaaagagctcaggtctaatgatgcaggcagataagtcacctagcagaacccactggatgctcaggattcagctcagccacaggcgcacagggcaaagatggctatctaggacagtggggaagtgagccagatagagagcagagaacttttgtttgtttgtttgttttttggagacaaagtctcagttactctgcggcccaggccggagggcagtggtgcaatcttggctcactgcaacctccacctcccaggttccagaaattctcctgcctcagcctcctgagtgtctgggattacaggcacacgccaccacacctggctactttttgtatttttagtagagatggggtttaaccattttggccaggctggtctcaaactcctgacctcatgtgatccacctgcctcagcctcccaaagtgctggtattacaagcatgagccaccgcacccggccaggagcagggaactttcttacggcagaagcgggctgtcctcgggccccttcaggctgaaggcagtggatcgaggccacagctgtgagcaggcagctaatgtccttcagttctaactgaagcaagagtagaggagcttagatctcagacttggtgtgtcagttgaggaagtccactggctttttgggatatgctacagggaaagagaaccccgtctttaaggagacctgattgaccgtcattccctgctgctccacaggatgcagaaggctatcaacaggctgagcaggcttctgaaacctggcgggatgatgcttctgcgagattacggccgctatgacatggctcagcttcggtttaaaaaaggtattttgaaagtgctgaatcctaaccactagagatcatgtcctttgcagggacatggatgaagctggaaatcatcattctcagcaaactaacacaagaacagaaaaccaaacaccactttttctcactcataagtgggagttgaacaatgagaacacatggacacggggcggggggcatcacacactggggtctgtctgggggtgagggggctgggagagggatagcattagcagaaatacctaatgtagatgacgggttgatgggtgcagcaaacctccatggcacatgtatacatatgtaataaacctgcacgttctgcacatgtaccccagaacttaaagtataattaaaaaaaaaaaaaggtatttggccactataatcaaaaaatggtgctgccatcagaatagaaactctagaattagaactccttatataaagccatttaatatgtgacagagtagtatattttttaagaaaactgaagaggcttgtataatctagatattgaggtctttttaagcaagacagctacctttagaagagcttttattagaaagacatttgaaagacagccgggcgcagtggctcatgcctgtaattccaacactttgggaggccgaggtgggtggatcgcctgagttcaagagttcaagaccagcctgaccaacatggagaaaccctgtctctactaaaaatacaaattagctgggcatggtggcgcatgcctgtaatcccagctactcgggaggctgaggcaggagaatcgcttgaacccaggaggcagaggttgcagtgagccaagatcacaccattgcactccagcctgggcaacgagtgaaactgtctcaagaaaaaaaaaaaaagatatttgaaagacataaataattttaaatgtggcatgacaaaagatgccattaaaaatgtaaaaggcaaatgacggagtaagaaggaatattttcagtgcatataatagataaagacttaatatctttgctcttcaaggagctctcatgaaactgataaggaaaagatcagtgacccacccaaaaaacaggcgaggagtatttagtcagttcacagaagaacatatctaaatggccagtaaacaacacttcaaggaaataaaaataacgagttagtacttcctattgctggccaattcaaagaaagaggtgcattccttcattactggtagaaaaagaaattgttacagcctttttttttgagatggagttttgccgttattgcccaggctggagtgcaatggcgtgatctcggctcactgcaacctctgcctcctgggtccacccgccttggcctcccaaaatgctgggattacaggtgtgagccactgtgcccagtgttacagcctttttttttttgagacggagtctcgctctgtctcccaggctggagtgcaatggcacgatctcggctcactgcaacctctgtctcttgggttcaagcaattctcctgcctcagcctcccgaatagccgagactacaggcatgtgccaccacgcctggctaatttttttgtatttttagtagagacagggtttcaccatgttggtcaggctggtctcgaactcctgaccttaggtgatccacccacctcagcctcccaaagtcctgggattacaggtgtgagccactgcgctcggcttacagcctttttttaagcacccaattattgttcaatccagtcattttttttgaatatagtcaagaactagcacataatacatgcaggagcaaaactttgtaaacaaagtgaatgcctctggatagggagatgttgtgcttgtcacctgaggtggaccccgtaccactgaacttggagggatttctgttctgtattcagtgagaggagagcaatgtgcaagggagtattttaaactccatccccctataccagtatctgcagggaaataagtacacacttgtgtgatgatttgggcattcaggaaggtctagaagtatgtgccaggccggtaaactgaggtaaggtcagggaggttagcagcagaagggaaagcatgttcatgatcaaaacaatatctgagttgtatttatgattctgtagacatgtgaagagacatgcaaaggacagtcaccaccaaaatggtaatgattgtctcaagtttccttaaactcagctatattgcttaattaaaaaaaataaaaataggccaggcacggtggctcatgcctttaatcccagcactttgggaggccacggtgggtggatcacctgaggtgaggagtttgagaccagcctggccaacatggtgaaaccctgactctactaaaaatacaaaaaattagctgggcatggtggtgggaacctgtaatcccagctacttgggaggctgaggcaggagaatcacttgaacctgggaggcagaggttgcagtgatccgaggtcacgccattgcacccagcctaggcaacaagagcgaaactccgtctcaaaataaataaataaataaaaagtttgtgctgttaatttaatggggttgggagagtgaacaagttgttttcatcaaacaattctagagttttggagtggggtgcttaggaacgtcatgttttctgacattgtgacttactcctgttgagctgctcttcccgaagcactgaggcaggagtgctctccacccaacaaactgacctcccagttaacattccttagcaatgcgagtcaaagaagtgcttttaagtgtctctgatttttaacacatcactctgcaggtcagtgtctatctggaaatttctacgtgagaggtgatggaaccagagtttacttcttcacacaaggtatgaaacacccatctttttacactaaaagtccccagtaccagatgagatggtcttcaaggcacgttcagaaggaaaactatctggtccctcctgccttttaggcaggctgtttcctgcggttccctgctgctcacaccctcttccaccctgggctaggctacccatggcagccaggcactggggcccccaggcagccctggcttgtccatgccttcagtcctgctctgctctccctgtctgccactgtccaaaatgggaagcctgcccactctgcaaggctcatctccagtccagcctgtttcaccctctacacggggttgtgctttggtgtgcccgggtcagggtgaaccctgggttctaggggtgctgggaactgctctcctctgcaactggcctatccacaggcttcatccttcacctgggccttccaaattctccgttcctgggcccttttcagggtcaccttctttgagcctttggttaagatgatgaaaccactttcctaaaacaattgctttgacatacatagatatttttgcataaattttaaggtgttcatagagcctaaaggccaaatataaaccaaaggtttttaaaaaagaaaaaaccgcggcccatacgcagtggcttcccctacctaaacatgaacttactgttaccaagccaccactgcatttataaccaaatggccatgtaaaaaacatgacagcaacttcccagagccccttttaacaaggacttagtagataaaaatgccttttcttgaggggaaaaatgcataaacatcttttattttccacactagaggaactggacacgcttttcaccactgctggactggaaaaagttcagaacctggtggatcgccgactgcaggtgaaccgaggaaagcaactgacaatgtaccgggtttggattcagtgcaaatactgcaagccccttctgtccagcaccagctgagaggcacctgctgccaacacgatgcaagcccattgtgtttccgggcttttttaaaaaaaaaattgtagcactgggcgtggtgcatgcctgtaatcccagccactcaggaggctgaggcggggaggatccattgagcccagcagtccaacctgggcaaaatagtgagagaccctgtatctgaaagtaataataaaaataaaaaatataaatgaggtctcgttgatgttggacaattcaagaattcagacttgaaccttaaacctaggaaaagttactttgtatcaggattctaacaattatgcttcatatttgtgaagtcctttaaaacataattttctcaagttctttctttgagatctcaatctgtcttagcattttgtaactaataactgaaattttattcaaaggaattgtaaaccttaaaccaccaatttatttccatgtgaaaaagtgttacatatgacaagtgttttttgactgtaattgcgttaaatcttttgagaatgtaaatgccgggctaggcaattgcagttaatacatacagaggttagtgaagggcttattaagttgtaggggaagcaagctgggaagaatcagatcagatattttcctgacaaaaaaaaatgaccctacagagagcatcaaaatgtggtgttcttgttaagtaattgatcgtggtcttcgctttaatcttagttccgccaggcacggtggctcacacctgtaatcccagcactttgggaggccaaggcgggcggatcagctgaggtcaggagttggagaccagcgtggccaacatggtgaaaccccgtctctactaaagataaaaaaattagctgagtgtgttggtgggtgcctgtaatccagctacttgggagactgaggcaggagaattgcttgaacccaggaggcagaggttgcagtgagctgagattgtgccactgcactccagcctgggcaacaaagcaagactctgtctcaaaaaaataaaaataaaaaaaaaatcttagttccatggaattttaagcattgttccccctctaacctgtgtctaaagaattaaaagaatttggccgggtgcggcagctcatgcctgtaatcccaacactttgggaggctgaggcaggcggatcacgaggtcaggagatcgagaccatcctggccaacacggtgaaacctcgtctccactaaaaataccaaaaaaattagctgggcatggtggcacacacctgtagtcccctgtagtcccagctactcgggaggctgaggcaggagaatcgtttgaacctgggaggtggaggttgcagtgagccaagatcatgtcactgcattccagcctgggcaacagaggaagactccgtctcaaaaaaaaaaaagaaaagaattttcactttttgcaaaattatcttttttaatgcacccttaagtgtttgacacaaaaggaattgagggaacttcttaattttaaccacatcatcacttcacttctgaatgtgatcattatcagtgttagatgc

SEQ ID NO: 371 - DNA, 1712 bp, Homo sapiens
gaagctgagtctgatagaacttagcccgtgaccttaatgggtactcggcagatgcagctgcctggctgattagagaacaggacaggcatggaccctgctttcggagcagtgctgtggaatagaactttgtgcagtgacggaaatgttctgcatcttcactctcccttatgatggtcagtagccacgtgtgaaatgtatctaatgggactgagaaactaaatttttaatttaagtagccacaggtagctagtgattaccatagcaaatgctgcagttccccaggtttttagtcttgattatacctcccagaagtcgtctgctccaaaggtcaacagttcagcaggaagcagagcccatgcctttgagaggctggaggtattgcatactcccaaaaatcccaggggctcactcataatgagcccaacagtgcagaagagttctgggctgttgtttctaaaatgcaagcatacagccttcctcctctcccattttcatttagacctgtactaacagaattctggcattacaaattgttttgtattttgatgtcttcagaataaatatataatgtgcttcataattgaaagcaattttgatggttttaaaatcaacattttttgtgttgctaccttgtgctgagacttgtgctagatagtgaggataccaagaaaaataagcacagggattttgtgttgttcatctttatctcctcagcatctaagataatacccaatgcatagtgggctctcagtagtgtttggtgaactaataagcgaaagatataatcgccactgtcaaagcactcactcactatgtggtgggggccaacagacaggtacagatgtgttcctggtgtggagaaagtgccagggtggctcagcgaagaaaaaagaattcttgtggtgctatcaagcaaggcttcatttgagggaaaagtaggatttctgtaggtggaaaaagagaagacattgatttgaaactccctggttgttttataaacttcatattagctatgtccacagagcctccaaaaggatataattcaaaagggattttaaccaaaatgaaatatgttgtgactaatagatacagtttatttgaatgaatgatagtttttcccatttgatattttaactgtgctacacaagaatgagagtagacatagctcgatttgtagtctcattgttctgtcttttctgcccatttcagtgacccaggactctttgtttattgctgtgatttttcttccacagctatagaactggtccaggtgagtacaatgggaaattacctattggtaatttccactgattaaagggaaaaggttctcctaaaaatcaaggtctctggctgtgttcttatacagtctgtgttcttacggtctaaaagtaaaagatttactgataacgagcataccttgttttattgcagttcactttatcacactgtatagatgtcgtatctgttcatatattgaaagtttgtggcaaccctgcatcaagcaagcctaccggtgccatttctccaccaccatatgctcacttagtatctatgtgtcatgctttggtgattctcagaatatttcagacttttttactgttatgtatgttatagtgtgtgatgttactgttgtacttggtttggggttccacaaatcacatctgtgtaagacggtcaacttaataaatgcatgcgttgtgactgctccacca

SEQ ID NO: 372 - DNA, 9474 bp, Homo sapiens
ttttttttttttttttttttttttttttgagacaggatttctgtcacccaagctggaatgcagtggtgccatcacagctcactgtagcttcaaccttccagggttcaggtgatcctcccacctcagcctcccaagtagctgggacaacaggcgtgtgccaccacccctgctaatttttgtcttttttgtagaaatggggttttgccatgttgcccaggccagggttcttaatatttttttaatgtatctgataaagccttaggatcatttctcaggctaatgtatttttcatttgttttctttttatatataacagctttattgagatataaagtgtgtaatacagtggtttttttgtttggttggttttttgttttgttttggtttggttttgaggtggcatcttgccctgtcgcccgggctggagtgcagtggcacgatcttggctcactgcaacctctgcctcccagtttcaagcgattctcctgcctcagcctcctgagtagctgggattacaagcgcccgccaccacacccagctaatttttgtatttttaggattcactgtgttggccaggctggtctcgaactcctgacctcgtgatctgcctgcctcggcctgccaaagtgctgggattacaggcgtgagccaccgcacccggctgtaatacagtggttttaagttaattcacagagttgtgcagccatcactgcagtcaacttcaggacattttcatcaccccaaaaagaatccctatacccattagcagtcactccccatttcccaatttcccccaatctctagccctaagcaaccactactctacaaatgcacaaatctctatatagatttatcttgggctaattttaagtatatgaagtaaaatagagaaaatcaattattttgaaatacagttctatcctcagagcccaattaaggactctgattttaaaaataatactcttagcccttcatattcaccttttctgcatccgaggattcaagcaaccatggattgaaaataaatagtataggccaggcgcagtggcccatgcctataatcccagcactttggaaggccaaggagataggatcacctgagcccaggagttcaagacgagcctgaacaacatagtgagaccccgtctctacaaaaaaattagccgcctggtgctgcggctcacgcctgtaatcccagcactttgggaggccgagacgggcagatcacaaggtcaggagatggagaccatcctggctaacacagtgaaaccccgtctccactcaaaatacaaaaaaaaattagccagtcgtggtggcaggcacctgtagtcccagctactcgggaggctgaggcaggagaatggcatgaacccaggaggcggagcttgcagtgagcggagatcgcaccactgcactccagcctgggcgacagagtgagactccgtctcaaaaaaaaaaaaaaaattgccaagcatgctggcatgcacgtgtagtctcagctactttggaggctgaggccagaggattggttggggctgcagtgagccatgatcacaccactgtactccaggtgacagagcaagaccctgtctcaaaaatcaataaaacaacaatttttaaaactataactgtttacatagcatttatattaggcgttatagatgatttaatgtatgcaggaggatgtgtgtgggttgtatgcaaatgctacacccgacaccattgtgtaagagacttgagctggataccaagggacaactatatgacctgtagaaaacttaaagaaaagcacaggccgggcgtggtggctcactcttgtaatcccagcagtttgagaggccaaggtgggtagatcacctgaggtcaggagttcgagcccagcctggccaacatggcgaaaccccatctttactaaaaatacaaaaattaaccaggcgtggtggtgggtgcctgtaatcccagctactcaggaagctaaggcaggaaaatggcttggacccaggagtggaggttgcagtgagccaagaccacgctattgcactccagcctgggtgacaaaagcaaaactccgtctcaaaaaaaaaagaaaagcacaaagaggccaggcacagtggctcatgcctgtaatctgaacactttgggaagccaaggtgggcagattacttaaggtcaggagttcaagaccaacctagtcaacatggtgaaaccctgtctctcctaaaaatacaaaaattaacaaggcatggtggtgggcacctgtagtcccagctactcaggaggctgaggtgggagaatcacttcaacctgggaggcagaggctgcagtgagctgagattgtcccactgtactccagcctgggtgacacagccaagacctcgtgtctcacaaaaaaaaaaagaaaaacatgaagaagaaaacaacgcttgccaggcgcggtggctcacccctgaaattccagcaccttgggaggccgaggcaggtggatcacctgaggtcaggagtttgagactagcctggccaacatggtgaaaccccgtctctactaaaaatacaaaaattagctgggtgtggtggtgcgcacctgtaatccgagctacttgaggggctgaggtaggaggatcacttgaacccaggaggcaaagactgcaatgagtcttttagaaagcagaagctgagtctgatagaacttagcccgtgaccttaatgggtactcggcagatgcagctgcctggctgattcgagaacaggacaggcatggaccctgctttcggagcagtgctgtggaatagaactttgtgcagtgatggaaatgttctgcatcttcactctcccttatggtgggcactagccacgtgtgaaacgtatctaatgggactgagaaactgaatttttaatttaagtagccacaggtagctagtgattaccatagcaaatgctgcagttccccgggtttttagtcttgattatacctcccagaagttgtctgctccaaaggtcaacagttcagcaggaagcagagcccatgcctttgagaggctggaggtattgcatactcccaaaaatcccagcgtctcactcaaattatgagcccaacagtgcagaagagctctgggctgttgtttctaaaacgcaagcatacagccttcctcctctcccatttttatttagacctgtactaacaaaaagaattctggcattacaaattgttttgtattttgatgccttcagaataaatatataatgtgcttcataattggaagcaattttgatggttttaaaatcaacattttttgtgttgctaccttgtgctgagacttgtgctagatagtgaggataccaagaaaaataagcacagggattttgtggtgttcatctttatctcctcagcatctaagataatacacaatgcatagtgggctctcagtagtgtttggtgaactaataagcgaaagatgtaatcgccgctgtgaaagcactcactcactatgtggtgggggccaacagacaggtacagatgtgttcctggtgtggagaaagtgccaaggtggctcagcgaagaaaaaagaattcttgtggtgctatcaagcaaggcttcatttgagggaaaagtaggatttctgtaggtggaaaaagagaagacattgatttgaaactccctggttgttttataaacttcatattagctatgtccacagagcctccaaaaggatataattcaaaaaggattttaaccaaaatgaaatatgttgtgactaatagatacagtttatttgaatgaatgatagtttttcccatttgatattttaactgtgctacacaagaatgagagtagacatagctcgatttgtagtctcattgttttgtcttttctgcccatttcagtgacccaggactctttgtttattgctgtgatttttcttccacagctatagaactggtccaggtgagtacgatgggaaattacctattggtaatttccactgattaaagggaaaaggttctcctaaaaatcaaggtctctggctgtgttcttatacggtctgtgttcttacggtctaaaagtaaaagatttactgataacgagcataccttgttttattgcagttcactttatcacactgtacagatgtcatatctgttcatatattgaaagtctgtggcaaccctgcatcaagcaagcctaccagtgccgtttctccaccaccatatgctcacttagtgtctgtgtgtcatgctttggtgattctcagaatatttcagacttttttactattatgtatgttatagtgtgtgacgttactgttgtacttggtttggggttccacaaatcacatctgtgtaagacggtcaacttaataaatgcatgtgttgtgactgccccaccaacctgccattccatttctctccctctcctcaggtctccttgttctctaagacacaatattgcaattaggccacttcatactctacagtgtcctctgtgtgctcaagtgaaaggaagagtttcaccacgttgcccaggctggtctcgaatgatagcttacacttgtgttgtaattattaaatttaatacacaattgcataaactaatgaaatacgattgcatgccggtgcggtgactcatgcctgtaatgccagcactttgggaggccagggtgggtggatcacgaggtcaggagttcaagaccagcctgaccaagtgaaaccccgtctctactaaaaatacaaaaaaattagccgggctaaaaatacaaaaaatggcacatacctgtaatttcagctactcaggaggctaaggcaggaggagaatcacttaaactcaggaggcggaggttgcagtgagctgagatcgcgccactgcactccagctagacgacagagcgagactccatctcaaaaaaataaaaataaagataaaaatacgttattggttggccacaatggcttaacgcctgtcatcccaacactttgggaggctgaggcagacagatcacttgagatcaggagttcaagactggcctaggcaacatggtgaaaccccatctctactaaagaaaaatacaagaaattatccaggcatggtggtgggcacctgtagtcacagctactcaaaaggctgaagcaggagaattgcttgaactggggaggcaaaggttgcagtgagccaagatcgtgccactgcactccagtctgggtgacagagtgagactccatctcaaaaaaaaaaaagggagaaagaaaaaaaatagtttattgctaaaacatattaataatcatctaaaccttcagtaagttgtaatctttgctagtggagggtcttgccttgatattgatggctgctgactgatcagggtggtgattgccaagggctggggtagtggttgctaagggctggggtgactggcaatttctttttttttttttttttgagacggagtctcgctctgtcgcccaggctggactgcagtggcgggatctcggctcactgcaagctccgcctcccgggttcacgccattctcctgcctcagcctcccaagtagctgggactacaggcgcccgccactacgcccggctaattttttgtatttttagtagagacggggtttcaccgttttagctgggatggtctcgatctcctgacctcgtgatccgcccgcctcggcctcccaaagtgctgggattacaggcgtgagccaccgcgcccggccggcaatttcttaaaataaggtaacaatgaagtttaccatatcaattggctcttcctttcatgaaagatttctctgtagcatgcgatgctgataggattttgcccacagtagagcttctttcaaattgaagtccattctctcaaaccctgctgctgctttatcaactaagtttgatgccatttcaaaacaaaaaacctttcttgccatttcaaaacaatgttcatagcatcttttctggagtagatttgatctcaataaaccactttctttgcccaaccgtaagaagcaactccttatagataaggatgctggttgaaagaaagaaagaaagaaagaataagactaaaaaagaagaagcaacaagattgcagcaattcagttacatcttcaggcttcacttttttttttttttttttgagacagggtctcactgtgttgtccaggctgaagtagagtgacacaatcatagcccactgtagccttgaattttgggctcaggcgaacctgatgagatgattccattggggttctttgagttacaagtaacagaaacatctagacaaactcaaagcaataaagtagaatgtcatagaacctaagggcacaaaatacagccccaagttcctggtatcttacctctcattgtccagggcccatttgttttttccctctttgcataccagttttctctagtcagtatttcctagttttgcacgtggccccaacgtgcttgcttcttccagtcccttacaagctcaccctgttcaggggttcatggtgcctcactaaaatgattgtgtcccagttctgaagtccctggaaagtctagttaacacaacctagctgataaatacagcagccctgtttgaatcagctttggccaatgagaaacaaactcacatatttggagaagatggacattgagggtagatgccttaaaatgtatctgttatggctgggtgcagtggctcacacctgtcatcccagcactttgggaggccacggccagcggatcatgaggtcaggagttcgataccagcctgaccaatatggtgaaaccccgtctctactaaaaatatgaaatttagctgggtatggtggcacgcacctgtagtcccagctacttgggaggctgaagaatcgcttgaacccaggaggcagaggttgcagtgagccgagatcgtgccactgcactccagcctgggtgacagagcaagactccatctcaaaaaaaaaaaaaaaaaaatgtgtctgttacaattggccaggcgtggtggccagcactttgggaggctgaggtgggcagatcacttgaggtcaggagttcaagaccagcctggccaacatggtgaaaccctgtctctactttaaaaaacacaaaaactaggccgggtgcagtggttcatgcctgtaatcccagcactttgggaggctaagacgggcagatcatctgaggtcaagagttccagaccagcctggccaatatggtgaaactccatctctactaaatacaaaaattagccaggtatggtggtaggtgcctgtagtcccagctactcgggaggctgaggcaggagaatcgcttgaacctgggaggcagaggttgtagtgagccaagatcacgccattgcactccagcctgggctacaagagcgaaactctatctcaaaaaaaaaaaaaatacaaaaactagcaggacgtggtggcatgcacctgtaatcccagctactggggaggctgaggcaggagaattgcttgaacctgggaaagcagaggttgcagtgagctgagatcgcaccactccagcctgggcaacagaacaagactctgtctcaaaaaaaaaaaaaaaaaagggtctgtcacaattatgtataatgctgttagggcagattaggaattggtagtgccatgcttttagaattattcatgcagttaaagaccaaatgaatattgaagcctatctttacttcagtttttgataacaaagtaaattttctacatctacagaaatagattttcctgaagaattctatggtttgtgtaatattttctagttgggagttgttttgaatcgtgtactttgttgtttgttttgagacagggtctcagtcactcaggctggagtgcagtggtacaatcaagctgactgcagccttgatctcctgggctcaagtgattctcccacctcctgtgtaactgggactacgggcacatgccaccacacctggctaatttttttttttttttgagatggagtctagctctgtcgcccaggctggagtgcagtggcgtgatctcggctcgctgcaacctccgcctcccaggttcaagcgattctcctgcctcagcctccagagtagctgggattacaggcgggtgccactgcacccagctaattttttgtatttttagtagagacggggtttcaccatgttggccaggctggttttgaactcctgacctcaggtaatccgcccacctcgacctcccaaagtgctaggattacaggcctgcacctggcatttttttattttttgtagagatgaagtctcactatgttgcctagctggtctcaaactcctgggctcaagtgatcctcctgcctcagcctcccagggtgctgggattctaggcgtgatccactgtgcctagcagatcgtgcttttggtttgtttgtttgtttgtttgtttgtttgtttttgtttttgagacggagtctccctctgttgcccaggctggagtgcagtggtgcgatctcggctcactgcaagctccgcctcccgggttcacgccattctcctgcctcagcctcccgagtagctgggactacaggcacctgccaccacacccggctaattttttgtatttttagtggagacggggtttcaccatgttagctaggatggtctccatctcctgacctcatgatctgcgcgcctcggcctcccaaagtgctaggattacaggcgtgagccactgcgtgcttatttaaagtatgtgctgtctctctccttatgaatgtttttttttttccctgttggtcactcattttcatgatcgttttccaattcttagatctgacttcatgcatgagaagtacagaaagtacacaagaataaagaataaaagtaggggagtcaggaatgttctattttaaacgcaactattagattcctcactgtctcccttcaattattcctgatctttactctttgagtcctccctgaaataacatgctattagattgatgcaaaagtaattgtcgtttttgccattacttttttttttttcttttctttttttagacggagtttcactcttattgcccaggctggagtgcaatggtacaatctcggctcactacaacctctgcctcctgggttcaagcgattctcctgcctcagcctcccgagtagctgggattataggcatgcgccaccacacccagctaattttgtatttttagtagagatggggtttctccatgttggtcaggctgctctcgaactcctgatctcaggtggtcctcccgccttggcctcccaaagtgctgggattacaggcatgagccaccacatccttgccattactttcaatagcaaaaaccacaattactttttcaccaatctatataatgattagaaatatatcccctactctggagggtgaggcaagtgatcctatcgcgtgaacccaacagtttgaggccagcctgggcaacatggggagattttgcctcaagaaaaaaaagaaaaaagaaataga

SEQ ID NO: 373 - DNA, 687 bp, Homo sapiens
tcagtggtgcaatgatagctcattatcacctcaaacttctggctcaagccatccctccgcctcagcctcctgagtagctaggactgcaggtgggcaccatcatgcctagctaattgttagatcctttttttttatgttctgcattttttcagttatttttacatatttctctcttgatccatgcagttataggatatatccttaattttagaaagtaaggacttttcgaccaggcgtggcggctcatgcctataatcccagcactttgggaggccgaggtgggcagatcacttgaggtcaggagttccagtccagcctggctaacatagtgaaaccccgtctccactaaaaaataaaaaatcagcccggcatggctgtgggcgcctgtaatcccagctactcaggaggctgaagtagaattgcttgaacctgggaggcagaggttgcagtgagccgagatggtgccattgcactccagcctgggtgacaagagcgaaactgcatctcagaaacaaagatgcctagctttcaccttgttgatgtttttctaaattttggaataataaatttatataggaatactgcaagaatagtccatttttttctgatgtcccaacatcaccaaatgtatccatcacaagtaggaatacatggaaacattaatgccagccactaaccattcatgtt

SEQ ID NO: 374 - DNA, 382 bp, Homo sapiens
cacaaggtcaggagatggagaccatcctggctaacacagtgaaaccccgtctccactcaaaatacaaaaaaaaattagccgggcatggtggcaggcacctgtagtcccagctacttgggaggctgaggcaggagaatggcgtgaacctgggaggcggagcttgcagtgagcggagattgcaccactacactccagcctgggtgacagagtgagactccgtctcaaaaaaaaaaaaattgccaagcatgctggcatgcacctgtagtctcagctactttggaggctgaggccagaggattggttggggctgcagtgagccatgatcacacacaccactgtactccaggtgacagagcaagaccctgtctcaaaaatcaatcaa

SEQ ID NO: 375 - DNA, 440 bp, Homo sapiens
gccacttcatactctacagtgtcctctgtgtgttcaagtgaaaggaagagtttcaccacgttgcccaggctggtctcgaatgatagcttacacttgtgttgtaattattaaatttaatacacaattgcataaactaatgaaatacgattgcatgctggtgcggtgactcatgcctgtaatcccagcactttgggaggccggggtgggcagatcacgaggtcaggagttcaagaccagcctgaccaagtgaaaccctgtctctactaaaaatacaaaaaaattagccgggctaaaaatacaaaaaatggcgcatacctgtaatttcagctactcaggaggctgaggcaggagaatcacttgaactcaggaggtggaggttgcagtgagctgagatcgcgccactgcactccagctagacaacagagtgagactccatctca

SEQ ID NO: 376 - DNA, 106 bp, Homo sapiens
atcccagcactttgagaggctgaggcgggtggatcacgaggtcaggagattgagaccatcctggctaacacggtgaaaccccgtctgtactaaaaaatagaaaaaa

SEQ ID NO: 377 - DNA, 32221 bp, Homo sapiens
  SITE (7464): n equals a,t,g, or c
cagagccctgccagcagccccctccctgcactggcccctgcctgccctcccctgggggtcgttcagaagtgccctgcccatcagtgccctgcttgtggctgcgacgcgcaatgattcctgcaatgcgcaacgactcccgcgatgcgcagtaattccgctggagatgcacaggcccttcgcccggatgagctccttggtcttcaaagactcccagaagccagggccacccctgagacccagagaggaagttccctggggcagctgagctagcgagatcgtcccctggttgtctggctggcttctgagcccacgcgatgcctgggaagccggccaggctggagggagaagccatgcctttgtgtgttcccgtgtgttactcccctgtcctggaacctcacatggctccccactgcctgaccaacccttcggttcaaggctgtgaaggacccctcagaccctgcctggctctcctgccttggtgtttttttaatctccttcacttaaatgccctgcgttcaaagcaaactgaattcttagcatatcctgaacatacctcaggctcttactctgttcctgcccccacggatcaccacctcccaaacaacctcccccaacctcttggttcctaactggcccatctaaatgccttcccaggccaggtgcatggcttgcacctgtagcactactccttggaaggctaaggcaggaggatcccttaaggccaggagtttgaggctgcagtgggttatgatcatgctactgccctccagcctgggcaagagagtgaaaccccatctctgaatgaatgaatgaatgaatgccttcacaaggcagcttccacctagaagccatctcagacagaccccactcacccgggtatgccatcaccccagcatttctggcagttccactctaggcctccatcccgtcccctgggaaatgggggtgataataggacctaccctatagggttgttgagcaagtcccagtgggaggacggcaggggagaacgggcaacatggctggcctctgtctgtgggtccagagggccagatgccttgcgctgggtgaggccatcctagaggcaggagaggagaggaggccccagcgaaaggccccagcccacttgtgttgctgtgggcagcaggggagggagagaggcctacagggggcctcagcagtctcgaagtcgcccagctaggccatcactggctgggctggggtcagggaaccatagctgatggggaatgcatggaggacagatgaccaatgtgaactgatgggactcagtttctcccctgggcctcagtttccctagctgtacaatgaagtggctgtgatgctgacaccttggtgttctgaggaagctgtgctctctgtggctgccgcaggggcaggagaaggccggtcatgctgctctctgggccagaacctctccccgggactcaagaccacccccggtgtctggtccttgcttcatctctgcccaccaccccatgggccctgcggatttgcgtagatccgcttcctgactcctcatctccagatgggttattttccgcattttccagaagatggaaactgaggtgtggggaagacaagagatttgtccaaggtcacctggaactgcccttcccttccccctcctagccctggaggattgctcctggggcaccctgtgccatcctgcctggcaggaggctgggggagtctgaggagcccctcatgtcccggccttacagatcgctgcccaggagctgtccgacaaccgcgtcatcacactaagcctggcgggcaggaggctggacaagaaggtaaggcgggcagaggaagggctcccattgggaacagtagcccccaccagccccagggctgtgtggcctcattccgggacctcgggccaccacctccatcacattctagggactggtccagcacggggccctcctggccactccagattaggactccttcacctctgaggtagtgagtgttccatcccttaggggtattcaaaacacacctggaaacctgctcattggggcatccccatctcacttagtgtaagtacattccaaggtccttacccaatggggccctgcctgatgtgtccccagtgccccgactctccgacctcacccctcctccccgcacctcactctgcttcagccaaacctagccccttgtccgtgaattaaacgaggcactctcctccctcaggagctttgcacttgctgttccctctgcctgggatgctctcttccttgaattttctcacggcaccctctcacctccatcaagcctttgctcccacatcacctcctcaacgaggccttccctgaaattggtcttcaatttcccaccccctccttctcgtctccttaacactattactgtctagcatactttctttcttttttttttttttttgagacagagtcctgctctgttgcccaggctggagtacagtggtgtcatctcagctcactgcaagctccgcctcctgagttcatgccattctcctgcctcagcctcccgagtagctgggactacaggcgcctgccaccacgcccagctaattttttttttttttgtacttttagtagagacggggtttcactatgatagccaggatggtctcgatctcctgaccttgtgatccgcctacctcggcctcccaaagtgctgggattacaggcttgagccaccatgcctggcccataccttctttacttattttctgtctccctaacttgaatataacctctttaaagtaacagttgccaggtgcagcggctcacacctgtaatcccagctacttgggaagctgaagcaggaggatcacttgaggccaggattttgagaccagcctgggcaatatagtgagaccccatagatggatggatggatggatggatggatggatggatggatggatagatagatagatagatagagtgagtcacatacaaaaagtggcactttttaaaccttaaatgattttttaaaggccatgatattccttatgtcatgtgcaggatagtttcagtttttcacattcccaataaaataaactgaaatgacaccctgctgggagcctcaccctaccttgggaatagtcaccctcttgaagtcctggcccatctaaaatgccggagttctgactcacacaggctctgagtcttggagggtctctgagcacaagctctgacagcctcagggtggggggtttctgctgggggacctggttgatcccagggggctgcagctgccctgggcctcttgctgagccttgcagagtctgaggggagggggccaggctggctctgcccacagctcctatcctgacacccggctggggaggcagcagggccacacccccatctgcctgaacctagcagggctgtacctctctcacccgcatcctcccacttctcccaggacctctttgggaagtcagacccctttctggagttttataagccaggagacgatggcaagtggatgctggtccacaggactgaggtgggtacgtgggggcccagggatctctaagcagtgggcctgcagtccagcccctccacagctctgaaaaagggaggtgcggtcacagccgctcagtgtgcaggaaaacccacagtggcacctgagggatatgcttcctcccagccacagggacgctcacttctgtctctggaagtgtggctgtgggtctgcattttgtcaccctgtccccattgggctgacccaaccccagagcactgctgcccagggcctgagctcacagcatccctctctgtcccacaggtgatcaagtacacactggaccctgtgtggaagccattcacagtgcccttggtgtccctgtgtgatggggacatggagaagcccatccaggtgagggggctctggggaccctgctccccaccttgccagctccagcctcccagtctacctgaggctcccggggatgccttgtagaaagctctttctcatacaagtggaacgaacccccatctttggaggagggaggactggagactgggtcctcatcctggatctatctgatgccctgaagtacccgggcagggcccccacctttgagcccctctctaaaactctcttgccctccccagagggctgcagagctgctagctagggaaacaccttggaaattatcaaatttggcatgatgaggacagtgattaccagtctctctaaaagctctcagtcctctggctgagtgcagtgtctcatgcctgtaatcccagcactttgggaggctgaggcaggtgggtcactggaggtcaggagttcaagaccagcctggccaacatgggaaaaccccatctctactaaaaatacaaaaattagccgagcatggcggtgcacgcctgtagtcccagctactcaggagcctgaggcaggagaatcacttgaatgtgggaggcggaggttgcagagcccagattgagccactgcactccagcatgggtaacagagcaagattctgtctcaaaaaaaaaaaaaaaagttataggccgggcgcggtggctcatgcctgtaatcccagcactttgggaggccaaggtgggtggatcacgatgtcaggagattgagaccaccctggcctctcacgtgaggcctctcacccaccctctcacggtctttagtagagaccgtctcaaaaaaaaaaaaaaattataaaataaaatcaaataaataaaaaataaaagctcttggtccccaggggctgggtctgagagcagatgggactggggagacagctaggtcaggacagagattcccaagtaggataccaggaatcttaggttctagtactgggtctgctactgctgctgtgagactttgggcaggtacatctctttcagggcctcagtttacccatcagtgggatgggaacaataatccctgccttcctcctaggagggccatagcagctcagacagcatataaagctgtgatttctgtgctcatctcagaaaaaaatatgtctagagagggccccaggccataagctgggtgggtcacaacccgaggtggagggggagccatttgccaggtgtataaggagtggagttgcctgcactagagggtacagcctccatcagtggggcagacacactttctccttttcccagcaatcacagaagtcttcctgcaggaggcagttcaggagctatccaggccagctaggcagatgctgaggagaggcactacccaaacagaagacagagggtttgcttggggagttgagaggggctggagagcacctcttgggggacagctctggggtgaccgtgctgaacccaccccaggtcatgtgctacgactatgacaatgacgggggccatgacttcatcggcgagttccagacctcagtgtcacagatgtgtgaggctcgagacagcgtcccggtgagatgggcacgtgtactgtaaccccaagacctcagcagggctgggggaaggggcaccgggtcttgggtcaggcagcctggggctgagatcccccttctggctgcatgaccttgagcaaggcattcaatctaagactcagtttctccatctgtcaatgggggcagaggatttgggtggggattgaatgagatgatgcaggcgaagtgcccagcatatagtgagcagtcaggagctatccatttaagtcattccgtgatgttgggccctcagctggacagtttgggggtgcgttatctggggaggagggaggcagatgctgatcctgctaccatttttgggtgtggacatcctgggaggctccctggaggaagcatgctgcccccattgtcaagcctgtggaagggattctagggccaaggaggaggatctgtttccaaagaagccccgaggtgagtgtctctttcttttgcgttgcccagctggagttcgagtgcatcaaccccaagaagcagaggaagaagaagaactataaaaactcgggcatcatcatcctgcgatcctgcaaggtgaaccagcgtgggcaagcacgagccaggggccaggtttcaggccacacagaagggacagacagagcactggatctggagccagcgaggcctgtgttcaaatcccggctctgccacatcctggccctatggccttctgagcttcacctcaccaggcctcagtctcctcatctgtggaatggagatattaacgaggcagagcatgtccagggttactcttctctcacattcctgtgtggaggccagggaaggcacgagctgaccttccagggcctgtcctggtgggagaattgtcattgcgagttgctgccgcccacggtgggcatgcaaggggcagaggacattgggtggggacaccctgtcctctctggcatcagcgtcactgtgactcccatggtacagccggggccactgaggcccagaaaggcaatgaagttcatgtcagcagtggccaggctgtgggtgggggccagaagacctggtgggcaaataactgctggatctggcagaacattaaggaaggcagcctggggcaggagagcaagagacctgggctcagggcctgacagctcaggagtctggccgctgctctccaccagcaggtggatcccagactcccaccttatttggagcctcgtctggctagggtttacacgaacattcagtggtgtcacgacaaaaaagcactccgttaaaggtcaagatgtcaggttgcagccttgtgatggatggtccttgtttctgaagtttccatcattcacatcacttttcacaatttctggcacctgccttacttatttttttgaatcagtctttcttccctgtattattgttttttgtttttgtttttgagacagagtctcactgtgttgcccaggctggagtgcagtggcgtgatctcagctcactgcaacctccgccttccaggttcaagggattctcctgcctcagcctcccaaatagctgggattacaggtgcatgccactacgcctggctaatttttgtgtttttagtagagatggggtttcattatgtcgaccaggctggtcttgaactcctgacctcaagtgatttgcctgccttggcctcccaaactgctaggattacaggaatgagccactatacctggcctgtttcttttctctttttttttttttttaacttaaatacatttatttagaaagagattattagaactctaccaaaattaaaagatctgccttctttgccaaaaagagacaaagaccatcaaaacaacttctagaggaaggccttgagctggaggcctgctctttctctttgttaaaaaggtagattaataagggccaggagaaggtaagtacctaacagtgacaaattgagacactctgtgtcaggtaactgacactgggccctggcaccctgcctggaaccagcatgtgtctgtgtatctgtggggtgttgggggtctcctgtnagtccccccccccccattagaaccattgcactgaaggctttgttatagagagatttgggttttgttgtaattagatcaggcccatcagctttttttgacctccttgtccctactgaggttgcaggacatagagcaacaactcccccatggggagtgtgaccaagtcaaggggacccactgactcatccgctttcttccagataaaccgagactactccttccttgactacatcctgggaggctgccagctcatgttcaccgtaaggctctccccgctggctccctctgcacccccatcccagtgagggtcctccctgaagacttgggccactagtgcagccagagggacttagggtagacttcaggaaggacttccctggggcaaagagtgtgtgcggcctagtgaggagggcataagtgggctgtctggtcctgctgggtgtgcctgagttggggcttaactacaggtcagagcacagctgcacagctttcagtctggtggctacactccttctgcgggtggaggaaaacaaattcctcctcactggccacaaggccttcagcgatccctgcctccttcatctgcagcctccttcctccttgctcactgggctctaaccacactcttcctctgtttgcccaacatgccaagctttgcttcatgttagaactttgcatttgctgttccttctgcatttgttgttccctctgcctgaaacacttccccagaacctttgcatggctgcctacctgccatttttcaggcctgaggaggtaacggaggtcaccttccagggagccctccctccctcaatgccttgctgctcctctgtcatatcttcctattttctttcttttcttttcttttcttttcttttttttttttgagacagcgtctcattctgtcacgtggtctagagtgcagtggcacgatctcagatcactgcagcctccaccttcagctctcagttgatcctcccacctcagcttcctgagtagctgggattacaggtgcatgccatcatgcccagctaatttttgcattttctgtagagatggggttttgctatgttgcccaggctggtctcaaactcctgggctcaagcgatctgcccaccttggcctctcaaagtgctaggattacaggcatgagtcactgggcctggccctcactattttcctattttctgggcacttgccgccccgagattcatatgcatttgtcgcttctccctgatcgtcgcacccactggaatgtgagtgcttttaagtgtgggcactttgtttattttgcttccactccaaccccagcatatcacacagtaactggcacatagcaggtgctccatcatttctcgttggaagaatgaactgccaccttgcctgtggcctggagtctttgccccacagactctgtgccactcatcctggctttgcttcctcaccccaagggagcctcaggcccagaagggaggaagctgctggggtgccacgctctgcccacctccccatgttgtctcaccgttccccatcaccacccctagatcctaatgggaaatggagggcatcacaggatgccatggagtcagaggattggccttgctgacttctgaccctgctgcccaccactgccccctcccctgcacagaggccaggccctcctgttcctcctgcacgagtttgttcattcagcgaactcacactgactgcctcctttgtgccgggctctaggctgtgtccctgcagcggtccctcaaggactaagacatgctgcccctgacctgggggagtgaccctctagccatgtgaggatttggatgggtggccccttctctcctaccccacagcaactgagttcccatgtagccaaatcttccccggggtcctacttctaaccctcccctgctgggcaggggttgttcttgcctacccctctgtgccctttctccagggattgggctgggattctctggggctgagagagcaggtagagccctagtccctgcctgcccatcagccccgagtccctgttaataagcacctgccttgtctgctgttcccagccctgggccaggcttctccagagtacgtgctgcggtgagctcccagctgatcggggagacgggcactgctctaccaggcaaccccaggtcccaggccccttggtggtctgagggataatggggagatggcttgggttgggggtgaggttatctgggaaggttgcagtggagcagtggcatctgagttgggcctggaagatggagcaaagttagacgggaagaaacgatagcctggctctgcatgcagagcgaagcttatgaataaatgcctgcatatgggaacagatgaatgtgtggatagggatagtaaggagaaaaaggaatctgggactgtacgttagtctcttatgtcatcacatctaggcagtggactttatgcttgggcaatagagagccacagatggcattagagcagaggagtgatacaatcagagcatttctaggtttcagaccatcttattgtggggagggctgggagatgagtgggcttcccatgtcccatctacctctcctattccctgggagtgggatagggtgctggggtctctggccccactgggtggcctttttctccactctgcaggttggaatagactttacagcctccaacgggaatcccctcgacccttcctctttgcactatatcaaccctatgggcaccaacgaatatctgtcggccatctgggctgttgggcagatcattcaggactacgacaggtaaggttggagaggggctctgaaggtcagctagggttccatccaacctgggaagctcagtgtatcaaagctagaagggacccagagatcatcaaatctaggaatggacagcaaatggcataggtgcagttattacccattcccatacccttggcagacattgctaatcaattgctgaactctaacctgccaagcgcagattcaaactgggatcgttttctacacagtacaccaagtagccagtaagaaaatgaatcatgatggaagattaaactcattcattattgctgcatcctctccttttagagctggggaatgggaggcctggggtgggagtggaaaatttgttccaggtcccgcagatcatgggaccagaggccagccattctggttcctgggcctggcgcctagttccctaatggtctcgcttctattgggaacttctgaggagcagctagcatgcacggaccctcctcccatgaccttgcttcctggggacctttgggtcgggctgggtaccacggaaagtcagtgaagggaagctgtgtgaaagtgtggcaggtgtggctaccaacaggatatgacatcactgtcacagatggtgctgattgggagctccaggtcagaggatggaatgaccaggaggctgacacattgggaacaggggaggaagaagcaggtgccagagatttggcaggaaagacagcaggctcaggagccctgtgtggacttggcctcctagagaggggcagccagggatctgtacaacatgcagagcaagggaggtggaagtcatcatcagcatggttgggtggagtcccaggtgtccagctgcccattcagcccatcaccgagctgtctaatgggcattaagacttagcatggccccagtgagctctagatgcctggctgagccaccatcactttgtgcccagatcatttcattagcttcctcatcagtctccctgcttctgccctggcccccagctgtgtgtcccctccacggcagccaaagggatccttagtagatgtctgttgagtgcacatacaaatgaaatgtggtccctgtcctcagggagttctcacttaaagaggaagataaggaagaaatcgtcggagttctgagagaccagtttacatgtgaagcaggagctatgggagcacaaaaagagaggcattttagggtatcagggaaatctacagagcgaaggggccattttgattgggccttagaggatgagtaggagtttgctagaggaaacagattagggagagatgttacagatgggggcacaacagcattgaagttggaatgtgaaggtaccctatgtgtttggggaatagcaagtggccagtggccagggctaggggagtggggtgtgaaggggcgtgggtggaaggagataagactaggctctgggactggatgacacaggaccttgaatgccacaggagggttctcatattagtagagttttccccagctatgagcaggaggctgagagacagccagtacattcattctacttccatcttgacctcctgaccttggtttagtggctggctgaagtctcagtttgagaaggatctagaagctgtgcccaggcccattggttagaagtaccattgtcgtgtctgccacaggtatagatgtggtcaggccacatgttcaccaggtccccagaggtgggttgggctcattaggtagatgatcctaacagctttttctagaggtggtgagctcctcctttctgtccttggaagtgtatgaggcagagtgggcccagccctgggcagagggtcgggtggtgtcctcaggtgtcttacagtgtgtttctcttctctctctgattagtgataagatgtttccagctctgggattcggggcccagttacccccagactggaaggtgagtgaaaccggagttagtttccttttggttgagatggggtttgtgtgtgtggcctctcggggatcagctctggaaaggtcttgggctggggccctgttgccctgccttccctgtgttcaccccaggccacgctcatttctcaagcctgatccttgggcaggcactgaggctgtaacggggcagcacgttatgttctctgtttatgagacccatgtggagtgggggagacagataggattgccagatgtcgcaaatcaaaatacaagacacccagttaagtttgaatttcaggtaaacaatgtttatttttatgtgtttatttttatttatttatttatttagagacagagtcttgctctgttgcccaggctggagtgcagtggcacaatctccacttacagcaacctccgcctcccaggttcaaacaattctcctgcctcagcctcccgagtagctgggattacaggtgcccaccaccaccccgcagctaacttttgtatttttagtagagagttttaccatgttgaccaggctggtctcaaactcctgacctcaggtgatccaccggcctcagcctcccgaagtgctaggattacaggcctgagccactgtgaccagtgcagataaacaatttttaaagtataagtatgtcctgaatatttcatgggacatacttatacttaaatcatccattgtttatctgaaattcaaggttttgtatggatctaggggtacaagtatagttgtattacgaggacgtattgtgtgaaatatggacttttagtgtattcatcacctaaataatgtacattgtacccagtaggtggcatttcatccgtcacccctccatcctctcgctgtgtggagtcctcagtgtctgttattcccctctgtgtgtctgttctgtgtgcacccattgtttagctccgtcttataagggagaacatgcagttttttgttttctgtttctgagtcatagtgggcatcctgtattctatatggcaacactaaagacaggtagtgtcatcggtgctgaggtgggggcaccgtaggcctgtggggagccgaggaggtaacccaacccagcttggggccatcaggcttcctggagggggcaagctctaagccaagaggggaaagggaagtagcagagtgactagaggtggcagtggggcagggggagccttcagggcagagaacagactgtgcgaagcctgcaggacgagctggaggaactggcagaggtgggtgatagaccctccattggaggtgagcagggtggagacagatgtgggcgttaaagggccacggggacccctgcagggaccacataggggctcatcagcagattggcatttctaaaggcctctcctggctgctgagtggggcgtggctagggcgagagtgggcagagtggagggtggagagaaggggcgaaggcaaggaaactcagggcagaggccaggactttctgtgtgaccaagtgagtgtgggccgaagaggtcaccaagatttccaactgggcactgaggcgggggtggtgctgcttactgagatgaggaacggggtgggtgctaggctcagcaggggagatggtaaggtgggagtcccaggagaaaggtggatgatggctgggcacagtggctcacgcctataatcccagcactttgggacgctgaggcagatggatcatttgaggtcagagagtttgagatcttcctggccagcatggcaaaaccccgtctctactaaaaatacaaaaattagcccagcgtggtggcacatgcctgtaatcccagctacttgggaggctgaagcaggagaatcacttgaactcgggaggcagtggttgcagtgagccgagatcgtgccactgcactccagcctgggcaacagagtgagaccctgttacaaaaaaaaagataagtggttgatgggtcaatgggtttgggctctggggagacagagagagacctggccacctgggccaggacccatggtgccacctctgggaggatgagattgctagggagacaggtggagtgagaaacagccacatgaggcggggtgcagtggctcacacctgtaatttcatgctttgggaggccaaggcaggaggattgcttgagccaggagttcaagaccagtctgggcaacacagtgagaccctggctttacaaaatttaaaagttggctgggtgcagtggctcacacttataatcttagcactttgggaggctgaggagggtggatcacaaggtgaggagttcgagaccagcctggccaacatggtgaaaccccgtctctactaaaaatacaaaaattagctaggtgtggtggcgggagtctgtaatcccagctactcgggaggctgaggcaggaagatccctggagcccagtgagctatgagtgcactgcactccagcctgggtgacagagtgagactctgtctctaaaaaattaattaattaattaattaaaataaaaaaagagacagctgcatgagagagccaggcagatgaagcggagactgagcccgggggcagagcagggaggaagtgaaggagggaggggcagaaagcaaacccataagtagcagcatttattgggcccttagaatgttctagataccactctgcctgctttaccagtttcaactaattctcaccaaagccaatgaggtaggccctgttatgaacccattttgatcgttgaggaagccaagcagtcagggctcggggaggagggagtggggttggaggctgcccctgggcctggtgaggtaaggctgagaagagaccatccgtttcactgaccatggctggggccattatggcagagacaagatggggaggggagaagggcatggagacatcagccagtgtggcagtcagccagcgtggaagtcaactggctgtgagggaggggaagggttaggtcaagcaggtctaaaggctgaggaggagccaggagaggcgtggaggtgaattgaagcgggggtccctgaggtgtggttgtgggtagtcctggggcaggaggcgggggctcctcatagaaccacgggcaccaggggaggggtggtttggtggctcagagatggagacgtcaatgagggcagaagctgtgatgctggggagtcgctgcagatgggcagggaatgctgtcccattttacagggcaataaactgaggcttggagcctcaaaatgacttgcccaaggccatgttcaccaactgggcagttggactctaaagtttcttctcagacactgttgcctccccatgagaagcctgtggggtgtgaggccagagagctcctaagcctgcacatgggtctcgctcggccagtgccccttcttgtctgccctgctgtgccgcattgctgtttccagagtgaatttttgcctcctgtcctctctggtcctctctggggaggatgattttcacctagaatttcggggagtggcccaagggccagggcaggagatgtgggtgtcctggctccctgtggtgtgaggctacgcctcagatgggaccaaagctgggccacagtgatgccattcggggggcagggcgagctggtgcggctgggcccagcacgagcccgttgctaggacaccagccagctttcaaagaactgaatgagatgttttcttgagcaaaagcctccttgtaaatgtcacagggcgatgctggggaggccagggcttggccaggctggagtgcccggcggtgccaagaaagatgctgcgtccaggctaggaaaggacagatgctgtgtcccacctccccctgccatgggagccgccaggcctggcccctcctggcccctcaccctctctcgcattctgactcgcctcactcctgctgcctgaagctccttcattcactcccacctcagggcctttgcacatggccttcactcagcccgctgctccctctcctgggcttctgccaccgattttcacctagaatttcggggagtggcctgccctctgggagccatgctcacactcacatgggggcccttcttcctgcccagagccctgccctcatggaactctgtgacttgtttgtgattgcctggggaaggcactgggtttctttctgcctgcatcccagcacctggcctgcagtgtgcagtgccattgtttgttgacggaatgaatttgggacccagcccaaatttgggaccccaggcctgagcaaacagaggggtcggttctctgagggtgggaagctagaaggaaccagaaggagcacgtgaccaggctgcctgcctttgagacctcagtttctccctgagggtggcccagatgatcccagagagaactcctgccccagagagtggctgagggtctcaggacgcgtttccctttggagatggcatgaggtcttggcccttcaacgtgagcagagttactcagatgaggaacgggatctgggcagaaggcacagtctgtgcaaaggtctgggaggagggggagcatactctgcaggtggggaaactgaggctcagagaggacagtcactctgagatcccttgggctttctccatgccccacccgctgcctctaccacctgcctcagccagggccacagggaactgagcctgaagtaactccctgacctcaaggctgagccaggccaggttgggtgaacagggccattggctgtcagaaggcaatagggagtcccaggacaaaggcctgtggctggcagccagtccccaggggcccctcatcagcttctgtggcctccaggaacttgttctgtttatgacttttctcaggcaaaccagggcaaccagtatgggaggggctgagctgccactcctggtagcatggacacttgtccccaggccccactgtgtgacctgggcactccctggccctctgggaacctcactctttccagctatgaaatggagttgctggaggagacaacctctggggcctctggggcagatggacaaccttccacagcccccctgaccgcaaggctgggccctccccaaataaagaggggggaagagtggggatgaagagcggggggcccgagaaggcaaaatattcctccacccctatcagcagggggctttcccactgtggtctctaaaatctcctaaaatctgatttttcaggaagactttggcccaagggagtcctgtttccctggcaaccattttctctctcagcccctccatacaagcccccctcgtaatctctatagaggctcaggaagtctccatggcaacagggacctccagcccccaaacctggagcccagactggggacagggtgaagtgggccctggacagggacaggacccaagagggacaccaggggactggctctgtgccgggcgcctaaagcagacagcaaagaacagaaaaccccattgcctgaaacggggaggagtcctcccaccacctcccctcccctgggctgccagggaggccagactgaaccccactgctgggtccctgccctctcccccaggagtaagaccaactcccacccccaggggaggggagggcactgggtctcaggcctgttcgactgtgtggctctggtgcctggcttcccttttctgggcctcggtttgtttatttgtaaaatggggacgctggatgcaggagagcctcccagtacccccatcgtcatgtcttggagctgaagagtctgtctgggattgtctgtgcccagacaaaagccctcctcctgcagctgaggaccggggcacccctccaccctcctcattgaaaatccctgggggaggaatgcctttggaggttagcgtgagctctgggagcagcctgacctcagttcgagtcccagctctgcccgccaggaaatgtgggaaaattctagtccactctgtgtctcagttttgtcatccataagatgaggtgataacagctgcccttccattggggtgttgtgaggaaggagtaaggggattcctgcacagcagtgaatgcggatgtggtacatggtaggaagggggctgagggggatttggggctgtggggctgcaagagagggaagaaaggagggactgtcccccatctgagctctgcagcgtctcccgaggccttgggttctgcaggcactgcagtctcacccacagccctgaacggggccagttatgagtccttctataccccgaagccatgcgagcagcagcagccggatgtgatgggtgcagcagtgtcccggagtgtccgggtcagtctctgatgatcctctggggctgggtgctgggcctggaggcagagaagcaggatgagtccctagggagcctatgatagccccatctgatccccttgcagcccccttacactccctgatcgccaggtcagctctgagtgggctgtcagctcacccccgtttggctgtctggcgcaaggcaggctcccctctaagcccctttgcttactgttaaggtaggaaaagcctctgaagcccagagaagcggtgctctagttgtggagcccacatccagctgtagcagtgatgagggagcatcctggaaccctggcccacagggaaatccctgtcccacccgggactcttagaggactgatggggcataggcagccccagtccccagaagagcccagggtgacctgccagggtctcagtttcctccactatgaggagagggtggttgggcctctctgtgggtcacacccagcagtggaggtgaaaagcagatgtggggggtatcagtggcctagaggagggtaggggtgggggttatgagccggtgctctcaaagggagccttggcctggcagtgggtggtggcctgggtctgggtttgggggcgggaggctgcagctcagcgttttctctgcgtttcaggtctcccatgagtttgccatcaacttcaaccccaccaaccccttctgctcaggtgagtgtcagacccacctgcagctgccctgtgtttgctacgggcctggccagctccctgggtggagggagggcagaggacaggttttcatttctttctcctttcccctcccccttactgttgctcagagtgacagagggggaagagctgcagtttggagtcagatagtcctggattcaaggccagctgctgcccttcctagctgtgggaccttggaaaggtcactgtacctcctgggcctttgcctccttacctgctccaggataactatgacagctgctcttctcactttactgggtggttcagtgagaattacaggaagccactgacaggaagtcctgtgtaaaccaggaggaggtgagggtggcaccagacacacctgctttcacctccttcccacccgcccccttgctgggaaggccagccctgctctgggagtacttggcgggggatcagggggaggcaggggctgggaagtgagtatggtgtctgtgttcatccccacccctgggcctaagaggatttctgagcctcctagggacagttaagaaactattagaggccggatgctgtggctcatgcctgtaatcccagcactttgggaagctgaggcaagaggagcacttgagcctaggagttcaagaccagcctgggcaatagagggagaccccatttctacaaattaaaaaaattacccaggcatggtggcatatgcctgtggtcccagctactcaggaagctgaggtgggaggaaagaaagagagatggggaggggaagggagggtcacacctttaatcccagcacttcggaaggccaaggtgggtagatcagaggtcaggagttcaagaccagcctggccaagattgtgaaaccccgtctgtactaaaactacaaaaattagccaggcgtggtggtgcgcacctgtaatcccagctactcaggaagctgaggcgggagaatcgcttgaacccaggtggcagaggttgcagtgagctgagatcatgtcactgcactccagcctgggtaacagagtgagactctgtctcaaaaaaaaaaaaaaaaaaggaaggagaaaagagaaagaaaggaaagagagagacagagagaaaggaaaggaaaggaagggaaggggaaggggaagggagaaggagggagggaaggaggaaggaaggaaggaaaggaggaagggagggaggaggggagggagggaggaagaaaggaagaaagaaagaaaaaggaagatgaaagaaggaagggagggatggaggaagggaggaagaaaactctgagtggaggagaggggatgcaggtgggtatggaagagggctgtttctatcatcatgagacctttccgcctaggacttggcttcaacatagcatctaccttccctggggatccccaaagctgggccaggctgtctgatttggggtagatctccagagacattttggtcaatcagcttcatccctggccaggccttctgggcagggctacagggcagtgtgctcataacagcagctatttacagagcgcctactctgtacaggcactgtgcgaacgccttgatcccccaaccacgaacagaagccatagcatgtccagaatggacctccagatggcttcccatggtctcaaagcatcactgcaagcttcgccaagccccttctctggaaaggcctgagagacccccctcctgccaactgccagagtgtagattatcagtcccattgacagacaaagacgtagcctcagaaagattaaactacttgccccaggtcccacagctaagaaaggcaggatttaggctggacacggtgactcatgcctgtaatcccagcactttgggaggccaaagtgggcagataacctgaggtcaggagtttgagaccagcctgggcaacatggcgaaaccctgcctctactaaaaatacaaaaattagccaggtgtggtggcacatgcctgtagtcccagctactcgggaggccgaggcaggagaattgcttgaacctggggggtggaggttgcactgagccgagatcctgtcactgcactccagcctgggtgacagagcaagactcctctcaaagaaaaggcaggattcaaactctacaggcctgtctgacttcacattcagggctcttggctttttaccatgctggcccttccctctggcagcttccagtctgtctcacaaggcctatgctagccatggcagggacattttgggtaagcatgaaatagatgtttcatcagcagtgagatgagagtgggtatggggtcagggagacctggctgatccagactcttctcccgaggcaggtgtggatggtattgcccaggcgtactcagcttgcctgccccacatccgcttctacggtcctaccaatttctcccccatcgtcaaccacgtggcccggtttgcggcccaggccacacaacagcggacggccacggtgagtaggcagctgcaagccagtcatgccaggaaacacgcacgtcctctgggctggggggcaggatattctgccttctctttgctttaaatcctagtggacacctctgggccttgctttaccttcacgtattgtaaaagttgagtcaagctcaacttgattggtcctggcttcctggagcacagactggagaaagcaaatccattcgtgctgagcaggaagcagggctgtgatcaacgggagatgtctccccagggcgaggtactggttattcccacaagagtaacaagatggaaaactggaggcagtgatccctgaggccctaacgctgacccttctgagccacctagttccaatcagagctgcccctgccttacactgagggctgctgaactgtctggccctggccctacactcagcaacaagcctagagcctcactggcccggctgaggctgccaaagtagctgcgtggcatctggaatatatggtaagcagccatcccaggcatctgcaaccgtggtctcccttcccttctcccgcccccagctgcaggctggctcccaggcaggccctactggcagggtctgatgccagtggtggggtcaccaaaggtcaccttgcccacctccccatttccaccatgacctgcccttgcctctctctgcagtatgagttgagaggtcttctccccctgccctaagggcagttatctgatgtcccttctgccttctcctgaccttggggacctgactgacctatgccctatgcataggacttctcagcccctgactcagccctgctcctcacgctccagcgccgtgacggggaatcaggcacccagcccagatgctggtctgggttgaggagacttgactccaattcctttctggccactacctcctgggagacctcggccagcccccacccctttctcatcttccacctccattgaaagaagagggttgctgaagtcacttctagagtgttcatttcactagactctaaaatatcccaaattcacccacttccccatggccacaggtctctcagtggaccctgcagctgccttcaccactcctcacaccaccagtccacaagctaccatttgtttcccccactggagggtcagatccagccgctgccctgccaaaaacccttcgccatcagattggatcccctgaggccagcctctgccttccttaccgacccgatcactgactgcacagccctttccttctcttaggatgattctgccacctaaccccccgtgtgttcctcgagcactcctagctgttcccccgcaggtccttcctggactctgcaaggccctccctcagggcctcctcccccaagcagccttccctgaccactatatgaagcagatctcttgccttctctgcctgttcctggctgaccctgatgatggtcggcaatgtctagttcacatccttctctccgtgcctggtccagtgcctgggctgtgcaggctcatcgtgctctgtgaatggatgaagtcagcactggctgagggatgtcagttgtacaagctcagtcagagcctcctcccccagggaaagggacctggtcccatgcctaaggggaccattgggaccagccaagggagggaggcacctggtcaccagggaggtggcagttgacttccgggaggtggtgggaaagatagtgcaactgcccagtgggttcaccttgcctgctgcctagaaagaatgatttatcaagacaggggaactgcaatggagaaagagtaattcacagagagccggttgtgcaggaaaccggacttttattatttctcaaatcagtctccccgagcatttggggatcagagtttttaaagataatttggcgagtagaagcttggaaagtggggagtgctgattggtcaggctggagatggaatcatagggggtcgaagtgagtttttcttgctgtctgaagtgagtttttcttgctgtcttctgttcctgggtgcaatggcagaactgactgagccagattaccagtctgggtggtgacagctgatccatggagtgcagggtctgcaaaatatctcaagcactgatcttaggtttcacagtagtgacatccccaatttggggaggttcagactcttggagccagaggctgcatgactcctaaactgtaatttccaatctgtagctgatttgttagtcctgcaaagacatactggaccccaggcaagaagagggtctttttgggaatgggctgttatcagtttgtttcagagtcaaaccgtgaactgaatcccttcccaaagttagtttggcctacacccaggaatgaacaaggacagttgaagggttagaagcaagatggagtcagttaggtctgatttctttcgctgtcataatttcctcagttataattttgcaaaggcggtttcaataggagtggggagtggcagagcctcttctgatggttcaggaggcagtagagaatctgtgggaaaaatgggtaccctggagtggcgggtgccagggtttgaatcctgccgctgtcccttcctcactgtgtgacttgggcaagtcacgtcaccttagtttcctcatttgtacagtgggaaaactaataggatcaatcaggaggaggtagtattaggattaaataagatcactcagcacatggcacccaaaaagacctgagggacggagaaggacaggccagcaaagcgctcagggaagagtggccggggtagagggaacaggaagcgcagggcgtggaggcagcacccggccagaaggagctcagagtgccagaaggagcttcccggccctgaccctggcaacccggagcctggggcatgtttcttcttatggaatggaatgtttcctgctctaaacccatttcctctttttgttttttgagacagagtttcactcttgttgcccaggctggagtgcaatggtgcaatcttggctcactgcaacctccgcctcctgggttcaagcgattctcctgtctcagcatcccaagtagctgggattacaggtgcccaccaccacgcctggttaattttttgtatttttagtagagatagggttccaccatgttggccaggcctgtctcaaacccctgtcctcaggtgatccgcccgcctcagcctcccaaagtgctgggattacaggtgtgagccactgcacccacacccatttcctcttatgaaatgggcgtagtaaacccccagtgtgctgtgaggacctgggtgcaggcttaatgggcagtaactgggaaaggcctgggagggatattttttttttgagacaaagtctcattctgttgcccaggctgaagtgcagtggcacagtctcagctcactgcaatcttcacctcctgggttcaagcaattctcctgactcaacctcctgagtagctgggattacaagcacctgccaccacgccgggctaatttttgtatttttagtagagacagagtttcaccatgttggccgcactggtcttgaacttgtgacctcaactgatctgcccacctcagcctcccaaagtgctgggattacagacctgagccacggcacccggccgggatttttttttttttttttttttttttttaattcctgggtttgctgggctagaactggctagagagggcacagcaagaggcaggcttcaccttgcactccctcctgttcgggtgccaggccattgtcccacccagtcttgtccaccctgagcaggctttcaaagggatagaaaaagaaagtcttgcatgtttgtttaaggggaaaaatgtggggcagggagcgggcgtgcagcccagtgttagcgccagggccctttcacagctgcacctgcagagctggggcaggactgggcaggaaccagggtcctggggagaggtgggtctgtgtctgctggacccaggtctgagggggtttgggccccaggaaaggccaggaagggcatttgtgtgttctggggagcagctgcggagagctccccagagggaagaagcagaaggacttgaggcccaagcacctggtgctagtcctctggacatcccagccacttttgctgcgacttggtcctcccggcctgggggaggcagccacctcctggctcctttctgctggaaaagctctgtcacccacccaggctgtgtgacctcaggggatgtctgagcatctctaacctgcaggagtggggccaaggggcctcttatcaggctctcccactctgatgtccaagaacagataaggccattctctacctcctgccttaccttatccccttggcctcagggtacaccagtggaggggaggtggggctgcctggtggttcagcctcaagctctgggaggttcaaatcccagctcccccacttcctgacttcgtgggaccgagagcaggtagcttaaactctgtgaacttgtttcctcatctgtgcgacgaggataatggaaacagtccctgccttctagaactagataggcatagaaattgctcagcatagtgcctggcacacataaagtgcttccctgctggccgaatcttttggggacacctcttgagctagcattcagtgatgccaagcacaattagtcccaaagcaaaaggaagtcatttatgaattatcccctgatgcttttgtcagccgttttttagtttggggaagaatatttggtgtggcttcaccctccccatccccagacatatgtgcaccgatgcacacccacgtacaggaaattgagagcaggtggtggaagcctctctctaggcagggctgcactctcccattcattcactcaacacatctttaccaaccaactttctgtgtagcactggggagaccatgatgagtgacacagggcctctgccctcccagagcctgcagtctagtgaggagccctaggccaggagcaggaggcagggagactaagcctgaggcgatggaagcacgggctcacagaggtggcatccgacccagatggagggctcaggaaaggctttttgggaaagtgacatgtgagctgaaacttggaggatgcttgagttagcctcataaaggatgtgtgtgcgtggagtgtctcaggcggagggaacggcacgtgccgaggcctggaggtttggtgtgtgggtgtatcggaaggaaggaatgtgttgaaagaggaggaggtggggtgaggtgaggctgaaaggtaggccagctcctgcggggcctcggaagccattgaggaacctgggttttctctggagggcggtggggagccactggaaggtcttatgcaggtttgagtgagccttggggggactcctatctcaggccttcatctttccctctgccttggcccctgagacctgggccttgctattcatggcccattcctggttggtcacccaggtgtctggtgtcccagtggagggggagctgggaagcacccagccagctccctggaaattccacccgctcccctcgcagggtcctcagctgccaacttccctgaaatgagctagggagtaagtgcagcttccctagactctgcctggaactgttgtggtcaagtcaatttcttataaatcaaatcaaacgttaaatgcattaggggaagcagttgtttacagccctagaaacctgaagaacctcggagtaaaggcaagagttgcttcatccttgttgggagttgggtttttggattcaatctgacagtgatgggctgtttctggaggtgggaatgctggggacagggtgaaccaggaccacctgcagggacaacagagcctgcagagcctcttccaaccccttgcacccgattccaccctccgttctctccatctacagccccttcccctttgatctgtcctgggggtagggctgtgtaatagacgtttgaggctcctgaacaactctggctttgtccaggctgggcgggaagccggggacttgtcagctgcacttccactgccgaggtctgggctgctgacctcaggcgcagctgggcacttgctgaggccaagcccctgtgtgtgggcatggtggctggttgattggcacataggggtgcgggttaaagtccagtaccagggctctgggccccaccctgggctgctatcctggatattcaggccctcagacactggcatgctgggtgggaggaaagcttttccctgccaggcccctctgttggagacaatgacagaccactggtgccagtgggcggtggaggaggacatcatgtaaagagccccagcttcggagtcagccaggctgggttcaatctggactgtgccagttcccggctgtgaggcctcaacaagttacatcacctctctgagctccactcctctagaatgggagtcagcatgagggtgacaggcagggtctgtgtagtgctgtcactgtgtggtatcacctcctctggccactggtgcccacagtcctgcaggaacctggccctgtctgcccccaggctccccagggaggagggctgccagctaagaggtaggcccaggcctgagccccacgcatctcctaggcacgggggctgatagaaacgagggagccaggagggccacgtgtggagggagtgggcactgcctgcctgagctggaacgggcttggaaacagatcccacccactgaaaggtgtggcccattagaccaggaccaagcattcttttctttcttcattgcccggcctcttagtgtctttctacctatctgcttaggtgtcccagaaatgttgccctggactgtttctgatggtattgaggtggggttggagggccgcctaagggaaggggcccaggaacagtggtgggctgtcaagggtagggtctggatgggcttctgaggcccctcacagccagggatggggggctggcaacagcagccctccactgtgggattcaggccaccatctccatggcaacaggtatccccagccaagggattggtctcttaaaggcacagtgctggagctagaccactgctgcctggagctgggggtgagggtggtggggtccgtgtctccacacagctcaccctgctccttccctccactgttgtacttggggggcagacaggaacaaggcaccctggaaggctgagcttgtagcctctgcaacctccccagggaacaagtggctttgctggatatgaaggtggctaagggctgacctggggtccagcttggttccaccctccttagctccatgaccttgactagtctaggccccagtttcctcttctggaagactaaagccccaaacagagaatatgaagaccacaagagctgatctgttgatgttacggatgggggaaactgagcttcccctaaaggggtcagcgggtactaaggacagagctgagctgaaaataagttcttggctgggcgcggtggctcacgtctgtaatcccagcactttgggaagccaaggcgggtggatcacctgaggtcaggagtttgagaccagcctggccaacgtggtgaaaccccaactctactgaaaatacaaaaattagtcgggcatggtggtgggtgcctgtaatcccagctacttgggaggttgaggcaggagaatcacttgaacccaggaggtggaggttgcagtgagcccaggttgtgccagtgtgggcgacggagcgagactcagtctaaaaaaaaaagaaaaaagagttcttggccaatttggaatcctgggccctcaccctcagatggtccaatgagccttcctgcacttcactcaggcacaccccggccccacttcacagtttgtattttatatatctcccacactaattattcaatttttaaaatttaatttataaagaaactctatatcccattgtaaatgaaaaaaagcagtatcacttgccataaatagagagtaacaaaaataaacacaacaagctgtacaatggtattaaagcctagctggagactattgtctcctcaagctctgggcttcctgccttccctttccgttgataaggaagcttagcaaatgttagagagacgtgaaagacacagtagtaccaaaccaagacttgctcctgggtgcagttcatagaattgaaaggccactgcaaaccagtcctcttccggggtgacttgatgacttgatggtgctcagtgctgtgtttgggatgtgactcaaatccacttatttgtcagcagagtcccacactcctggaagccctggcccagacgacctgctttagctcccgcaaggtgtctcagattgtcgtgttgagtagggaatggagggggtcacaggtgcccatgcccaggtgcagcagagagggggagaccggtcccagagcagcccatcagccagatgagtccccctgcgccagccgtgggcctgtcgggaatgcagctgactgggccactgccacgtcaggcacattatctgcaacaactcccactttgcagatgaagaaactgaggcactacgagtcaagtcagttgcctagagtcccacagtatagcaactggcaaggccaggcccagagtccagggctctcagaggccccaagggggagtctaagataacacacagggcaggaggggagagcagtttgtacttcctgctgtgaccaggtcagagtttagagcatgagaggcctgcaggggtggggtgctgagagcaggacgcatagtgagttgtctgggacttggctgcagctgggtaagatgcactgccttcctccaggactcggagggtttgggatgaaggagggagggagaaggggtgccagagcctcgaccttgctgagtgccccgttggccccctccctgcagcagtacttcatcctcctcatcatcacggacggggtcatcagtgacatggaggagacacggcatgccgtggtgcaggcttccaagctgcccatgtccatcatcatcgtgggcgtgggcaatgcggacttcgctgccatggagttcctggatggggacagccgcatgctgcgctcccacacgggggaggaggcagcccgcgatattgtgcagttcgttccctttcgagagttccgcaacgtgagtgtgggcctgggctgggagggggcggttacaggatcccagccaccatagctcataatcaagcttgagagtcttggggttgtctggcccaatcctagacttctccactccattgactatgctcttctgagggcctgccatgtgccaggcgccgtgccaggccttgccccggtggtggccattgtgatagtgtgagcacttgcttccacaaactgatggaacatggagccgtgggcatctagcctgaggctctggggcagggcttcctggaggacctgccctctagtggggtctgatgagaggctggggctatccatgtggtgtaaagtgcaggaggagagaggggttttcctgatcatcacgccccagcaagccccctcattttgtagacggaaaacaaggcctcccagtcatcttaggttgacctcctctccctaaagccctctgcctgggagaatggtgtccccagccttgttcctggaagtggctctggctttatttgcaggtgatcccagatctgcccacaaggaggccggggttggcctcctgatcactgccctagcagcagggtccatgaggagtcccataggggagcagtctctccactgtaccgctgtactgtaatgccacccccatactgctggctgggggcttaacccagcctcagcaagaactgcccatgctggtttgcacccagtggccctcacctctcttcccagcatcctctggggttgcctgcgatggttctactccttcctctggagcattcgcttcctaaggacaaaccctgggcatcggtcaccccttcatgcacaggtcggtgaccgagtacctccatgtgcctggcctgtggctggctgttcactagtgaaccatactgtcaggcccatttattcccgccaagaaggtgctcaggagatgtttgccggacacataggtgcttcccgcagacggagtcatcctaacccgttactcccaagcatctcaagtgctccaggtaacacttacacctaacctaaaggaaggcactgcgatcagggggaatttcaggcctggcctgggctgagatgagggatgccacttgcagacagccctggcccgcagccctaattttgtcctcaatggacacctgctgtagcagcccctctgggcatagtgccgctcacaacttccggtcattaatccttattctctctcttgcccaccccaccctacctccaccctgcaggcagcaaaagagaccttggccaaagctgtgctggcggagctgccccaacaagttgtgcagtatttcaagcataaaaacctgccccccaccaactcggagcccgcctgagctccagtgcccagcagcagcatgtcagctgagcctcctgccctcccccaggaacatgcacgctcactctgcttccttgtgggtggcctttttttaccgatccccttttttattttttacaaccggacctccacccccaacttcctccagcccagctgggcttcctttgttggagtcaactgttgatgcttccaggccaaactggcttcctctcctcctctccccacctttgccattcttaagtattgaatgtactttgtataattttagtggaattgttattgagaataaaatttttacaatcataac

SEQ ID NO: 378 - DNA, 596 bp, Homo sapiens
ttattcaatttttaaaatttaatttataaagaaactctatatcccattgtaaatgaaaaaaagcagtatcacttgccataaatagagagtaacaaaaataaacacaacaagctgtacaatggtattaaagcctagctggagactattgtctcctcaagctctgggcttcctgccttccctttccgttgataaggaagcttagcaaatgttagagagacgtgaaagacacagtagtaccaaaccaagacttgctcctgggtgcagttcatagaattgaaaggccactgcaaaccagtcctcttccggggtgacttgatgacttgatggtgctcagtgctgtgtttgggatgtgactcaaatccacttatttgtcagcagagtcccacactcctggaagccctggcccagacgacctgctttagctcccgcaaggtgtctcagattgtcgtgttgagtagggaatggagggggtcacaggtgcccatgcccaggtgcagcagagagggggagaccggtcccagagcagcccatcagccagatgagtccccctgcgccagccgtgggcctgtcgggaatgcagctgactgggccactgc

SEQ ID NO: 379 - DNA, 32189 bp, Homo sapiens
cactggcccctgcctgccctcccctgggggtcgttcagaagtgccctgcccatcagtgccctgcttgtggctgcgacgcgcaatgattcctgcaatgcgcaacgactcccgcgatgcgcagtaattccgctggagatgcacaggcccttcgcccggatgagctccttggtcttcaaagactcccagaagccagggccacccctgagacccagagaggaagttccctggggcagctgagctagcgagatcgtcccctggttgtctggctggcttctgagcccacgcgatgcctgggaagccggccaggctggagggagaagccatgcctttgtgtgttcccgtgtgttactcccctgtcctggaacctcacatggctccccactgcctgaccaacccttcggttcaagggctgtgaaggacccctcagaccctgcctggctctcctgccttggtgtttttttaatctccttcacttaaatgccctgcgttcaaagcaaactgaattcttagcatatcctgaacatacctcaggctcttactctgttcctgcccccacggatcaccacctcccaaacaacctcccccaacctcttggttcctaactggcccatctaaatgccttcccaggccaggtgcatggcttgcacctgtagcactactccttggaaggctaaggcaggaggatcccttaaggccaggagtttgaggctgcagtgggttatgatcatgctactgccctccagcctgggcaagagagtgaaaccccatctctgaatgaatgaatgaatgaatgccttcacaaggcagcttccacctagaagccatctcagacagaccccactcacccgggtatgccatcaccccagcatttctggcagttccactctaggcctccatcccgtcccctgggaaatgggggtgataataggacctaccctatagggttgttgagcaagtcccagtgggaggacggcaggggagaacgggcaacatggctggcctctgtctgtgggtccagagggccagatgccttgcgctgggtgaggccatcctagaggcaggagaggagaggaggccccagcgaaaggccccagcccacttgtgttgctgtgggcagcaggggagggagagaggcctacagggggcctcagcagtctcgaagtcgcccagctaggccatcactggctgggctggggtcagggaaccatagctgatggggaatgcatggaggacagatgaccaatgtgaactgatgggactcagtttctcccctgggcctcagtttccctagctgtacaatgaagtggctgtgatgctgacaccttggtgttctgaggaagctgtgctctctgtggctgccgcaggggcaggagaaggccggtcatgctgctctctgggccagaacctctccccgggactcaagaccacccccggtgtctggtccttgcttcatctctgcccaccaccccatgggccctgcggatttgcgtagatccgcttcctgactcctcatctccagatgggttattttccgcattttccagaagatggaaactgaggtgtggggaagacaagagatttgtccaaggtcacctggaactgcccttcccttccccctcctagccctggaggattgctcctggggcaccctgtgccatcctgcctggcaggaggctgggggagtctgaggagcccctcatgtcccggccttacagatcgctgcccaggagctgtccgacaaccgcgtcatcacactaagcctggcgggcaggaggctggacaagaaggtaaggcgggcagaggaagggctcccattgggaacagtagcccccaccagccccagggctgtgtggcctcattccgggacctcgggccaccacctccatcacattctagggactggtccagcacggggccctcctggccactccagattaggactccttcacctctgaggtagtgagtgttccatcccttaggggtattcaaaacacacctggaaacctgctcattggggcatccccatctcacttagtgtaagtacattccaaggtccttacccaatggggccctgcctgatgtgtccccagtgccccgactctccgacctcacccctcctccccgcacctcactctgcttcagccaaaactagccccttgtccgtgaattaaacgaggcactctcctccctcaggagctttgcacttgctgttccctctgcctgggatgctctcttccttgaattttctcacggcaccctctcacctccatcaagcctttgctcccacatcacctcctcaacgaggccttccctgaaattggtcttcaatttcccaccccctccttctcgtctccttaacactattactgtctagcatactttctttcttttttttttttttttgagacagagtcctgctctgttgcccaggctggagtacagtggtgtcatctcagctcactgcaagctccgcctcctgagttcatgccattctcctgcctcagcctcccgagtagctgggactacaggcgcctgccaccacgcccagctaattttttttttttttgtacttttagtagagacggggtttcactatgatagccaggatggtctcgatctcctgaccttgtgatccgcctacctcggcctcccaaagtgctgggattacaggcttgagccaccatgcctggcccataccttctttacttattttctgtctccctaacttgaatataacctctttaaagtaacagttgccaggtgcagcggctcacacctgtaatcccagctacttgggaagctgaagcaggaggatcacttgaggccaggattttgagaccagcctgggcaatatagtgagaccccatagatggatggatggatggatggatggatggatggatggatggatagatagatagatagatagagtgagtcacatacaaaaagtggcactttttaaaccttaaatgattttttaaaggccatgatattccttatgtcatgtgcaggatagtttcagtttttcacattcccaataaaataaactgaaatgacaccctgctgggagcctcaccctaccttgggaatagtcaccctcttgaagtcctggcccatctaaaatgccggagttctgactcacacaggctctgagtcttggagggtctctgagcacaagctctgacagcctcagggtggggggtttctgctgggggacctggttgatcccagggggctgcagctgccctgggcctcttgctgagccttgcagagtctgaggggagggggccaggctggctctgcccacagctcctatcctgacacccggctggggaggcagcagggccacacccccatctgcctgaacctagcagggctgtacctctctcacccgcatcctcccacttctcccaggacctctttgggaagtcagacccctttctggagttttataagccaggagacgatggcaagtggatgctggtccacaggactgaggtgggtacgtgggggcccagggatctctaagcagtgggcctgcagtccagcccctccacagctctgaaaaagggaggtgcggtcacagccgctcagtgtgcaggaaaacccacagtggcacctgagggatatgcttcctcccagccacagggacgctcacttctgtctctggaagtgtggctgtgggtctgcattttgtcaccctgtccccattgggctgacccaaccccagagcactgctgcccagggcctgagctcacagcatccctctctgtcccacaggtgatcaagtacacactggaccctgtgtggaagccattcacagtgcccttggtgtccctgtgtgatggggacatggagaagcccatccaggtgagggggctctggggaccctgctccccaccttgccagctccagcctcccagtctacctgaggctcccggggatgccttgtagaaagctctttctcatacaagtggaacgaacccccatctttggaggagggaggactggagactgggtcctcatcctggatctatctgatgccctgaagtacccgggcagggcccccacctttgagcccctctctaaaactctcttgccctccccagagggctgcagagctgctagctagggaaacaccttggaaattatcaaatttggcatgatgaggacagtgattaccagtctctctaaaagctctcagtcctctggctgagtgcagtgtctcatgcctgtaatcccagcactttgggaggctgaggcaggtgggtcactggaggtcaggagttcaagaccagcctggccaacatgggaaaaccccatctctactaaaaatacaaaaattagccgagcatggcggtgcacgcctgtagtcccagctactcaggagcctgaggcaggagaatcacttgaatgtgggaggcggaggttgcagagcccagattgagccactgcactccagcatgggtaacagagcaagattctgtctcaaaaaaaaaaaaaaaagttataggccgggcgcggtggctcatgcctgtaatcccagcactttgggaggccaaggtgggtggatcacgatgtcaggagattgagaccaccctggcctctcacgtgaggcctctcacccaccctctcacggtctttagtagagaccgtctcaaaaaaaaaaaaaaattataaaataaaatcaaataaataaaaaataaaagctcttggtccccaggggctgggtctgagagcagatgggactggggagacagctaggtcaggacagagattcccaagtaggataccaggaatcttaggttctagtactgggtctgctactgctgctgtgagactttgggcaggtacatctctttcagggcctcagtttacccatcagtgggatgggaacaataatccctgccttcctcctaggagggccatagcagctcagacagcatataaagctgtgatttctgtgctcatctcagaaaaaaatatgtctagagagggccccaggccataagctgggtgggtcacaacccgaggtggagggggagccatttgccaggtgtataaggagtggagttgcctgcactagagggtacagcctccatcagtggggcagacacactttctccttttcccagcaatcacagaagtcttcctgcaggaggcagttcaggagctatccaggccagctaggcagatgctgaggagaggcactacccaaacagaagacagagggtttgcttggggagttgagaggggctggagagcacctcttgggggacagctctggggtgaccgtgctgaacccaccccaggtcatgtgctacgactatgacaatgacgggggccatgacttcatcggcgagttccagacctcagtgtcacagatgtgtgaggctcgagacagcgtcccggtgagatgggcacgtgtactgtaaccccaagacctcagcagggctgggggaaggggcaccgggtcttgggtcaggcagcctggggctgagatcccccttctggctgcatgaccttgagcaaggcattcaatctaagactcagtttctccatctgtcaatgggggcagaggatttgggtggggattgaatgagatgatgcaggcgaagtgcccagcatatagtgagcagtcaggagctatccatttaagtcattccgtgatgttgggccctcagctggacagtttgggggtgcgttatctggggaggagggaggcagatgctgatcctgctaccatttttgggtgtggacatcctgggaggctccctggaggaagcatgctgcccccattgtcaagcctgtggaagggattctagggccaaggaggaggatctgtttccaaagaagccccgaggtgagtgtctctttcttttgcgttgcccagctggagttcgagtgcatcaaccccaagaagcagaggaagaagaagaactataaaaactcgggcatcatcatcctgcgatcctgcaaggtgaaccagcgtgggcaagcacgagccaggggccaggtttcaggccacacagaagggacagacagagcactggatctggagccagcgaggcctgtgttcaaatcccggctctgccacatcctggccctatggccttctgagcttcacctcaccaggcctcagtctcctcatctgtggaatggagatattaacgaggcagagcatgtccagggttactcttctctcacattcctgtgtggaggccagggaaggcacgagctgaccttccagggcctgtcctggtgggagaattgtcattgcgagttgctgccgcccacggtgggcatgcaaggggcagaggacattgggtggggacaccctgtcctctctggcatcagcgtcactgtgactcccatggtacagccggggccactgaggcccagaaaggcaatgaagttcatgtcagcagtggccaggctgtgggtgggggccagaagacctggtgggcaaataactgctggatctggcagaacattaaggaaggcagcctggggcaggagagcaagagacctgggctcagggcctgacagctcaggagtctggccgctgctctccaccagcaggtggatcccagactcccaccttatttggagcctcgtctggctagggtttacacgaacattcagtggtgtcacgacaaaaaagcactccgttaaaggtcaagatgtcaggttgcagccttgtgatggatggtccttgtttctgaagtttccatcattcacatcacttttcacaatttctggcacctgccttacttatttttttgaatcagtctttcttccctgtattattgttttttgtttttgtttttgagacagagtctcactgtgttgcccaggctggagtgcagtggcgtgatctcagctcactgcaacctccgccttccaggttcaagggattctcctgcctcagcctcccaaatagctgggattacaggtgcatgccactacgcctggctaatttttgtgtttttagtagagatggggtttcattatgtcgaccaggctggtcttgaactcctgacctcaagtgatttgcctgccttggcctcccaaactgctaggattacaggaatgagccactatacctggcctgtttcttttctctttttttttttttttaacttaaatacatttatttagaaagagattattagaactctaccaaaattaaaagatctgccttctttgccaaaaagagacaaagaccatcaaaacaacttctagaggaaggccttgagctggaggcctgctctttctctttgttaaaaaggtagattaataagggccaggagaaggtaagtacctaacagtgacaaattgagacactctgtgtcaggtaactgacactgggccctggcaccctgcctggaaccagcatgtgtctgtgtatctgtggggtgtgggggtctctgtgagtcccccacccattaggaaccattgcactgaaggctttgttatagagagatttgggttttgttgtaattagatcaggcccatcagctttttttgacctccttgtccctactgaggttgcaggacatagagcaacaactcccccatggggagtgtgaccaagtcaaggggacccactgactcatccgctttcttccagataaaccgagactactccttccttgactacatcctgggaggctgccagctcatgttcaccgtaaggctctccccgctggctccctctgcacccccatcccagtgagggtcctccctgaagacttgggccactagtgcagccagagggacttagggtagacttcaggaaggacttccctggggcaaagagtgtgtgcggcctagtgaggagggcataagtgggctgtctggtcctgctgggtgtgcctgagttggggcttaactacaggtcagagcacagctgcacagctttcagtctggtggctacactccttctgcgggtggaggaaaacaaattcctcctcactggccacaaggccttcagcgatccctgcctccttcatctgcagcctccttcctccttgctcactgggctctaaccacactcttcctctgtttgcccaacatgccaagctttgcttcatgttagaactttgcatttgctgttccttctgcatttgttgttccctctgcctgaaacacttccccagaacctttgcatggctgcctacctgccatttttcaggcctgaggaggtaacggaggtcaccttccagggagccctccctccctcaatgccttgctgctcctctgtcatatcttcctattttctttcttttcttttcttttcttttcttttttttttttgagacagcgtctcattctgtcacgtggtctagagtgcagtggcacgatctcagatcactgcagcctccaccttcagctctcagttgatcctcccacctcagcttcctgagtagctgggattacaggtgcatgccatcatgcccagctaatttttgcattttctgtagagatggggttttgctatgttgcccaggctggtctcaaactcctgggctcaagcgatctgcccaccttggcctctcaaagtgctaggattacaggcatgagtcactgggcctggccctcactattttcctattttctgggcacttgccgccccgagattcatatgcatttgtcgcttctccctgatcgtcgcacccactggaatgtgagtgcttttaagtgtgggcactttgtttattttgcttccactccaaccccagcatatcacacagtaactggcacatagcaggtgctccatcatttctcgttggaagaatgaactgccaccttgcctgtggcctggagtctttgccccacagactctgtgccactcatcctggctttgcttcctcaccccaagggagcctcaggcccagaagggaggaagctgctggggtgccacgctctgcccacctccccatgttgtctcaccgttccccatcaccacccctagatcctaatgggaaatggagggcatcacaggatgccatggagtcagaggattggccttgctgacttctgaccctgctgcccaccactgccccctcccctgcacagaggccaggccctcctgttcctcctgcacgagtttgttcattcagcgaactcacactgactgcctcctttgtgccgggctctaggctgtgtccctgcagcggtccctcaaggactaagacatgctgcccctgacctgggggagtgaccctctagccatgtgaggatttggatgggtggccccttctctcctaccccacagcaactgagttcccatgtagccaaatcttccccggggtcctacttctaaccctcccctgctgggcaggggttgttcttgcctacccctctgtgccctttctccagggattgggctgggattctctggggctgagagagcaggtagagccctagtccctgcctgcccatcagccccgagtccctgttaataagcacctgccttgtctgctgttcccagccctgggccaggcttctccagagtacgtgctgcggtgagctcccagctgatcggggagacgggcactgctctaccaggcaaccccaggtcccaggccccttggtggtctgagggataatggggagatggcttgggttgggggtgaggttatctgggaaggttgcagtggagcagtggcatctgagttgggcctggaagatggagcaaagttagacgggaagaaacgatagcctggctctgcatgcagagcgaagcttatgaataaatgcctgcatatgggaacagatgaatgtgtggatagggatagtaaggagaaaaaggaatctgggactgtacgttagtctcttatgtcatcacatctaggcagtggactttatgcttgggcaatagagagccacagatggcattagagcagaggagtgatacaatcagagcatttctaggtttcagaccatcttattgtggggagggctgggagatgagtgggcttcccatgtcccatctacctctcctattccctgggagtgggatagggtgctggggtctctggccccactgggtggcctttttctccactctgcaggttggaatagactttacagcctccaacgggaatcccctcgacccttcctctttgcactatatcaaccctatgggcaccaacgaatatctgtcggccatctgggctgttgggcagatcattcaggactacgacaggtaaggttggagaggggctctgaaggtcagctagggttccatccaacctgggaagctcagtgtatcaaagctagaagggacccagagatcatcaaatctaggaatggacagcaaatggcataggtgcagttattacccattcccatacccttggcagacattgctaatcaattgctgaactctaacctgccaagcgcagattcaaactgggatcgttttctacacagtacaccaagtagccagtaagaaaatgaatcatgatggaagattaaactcattcattattgctgcatcctctccttttagagctggggaatgggaggcctggggtgggagtggaaaatttgttccaggtcccgcagatcatgggaccagaggccagccattctggttcctgggcctggcgcctagttccctaatggtctcgcttctattgggaacttctgaggagcagctagcatgcacggaccctcctcccatgaccttgcttcctggggacctttgggtcgggctgggtaccacggaaagtcagtgaagggaagctgtgtgaaagtgtggcaggtgtggctaccaacaggatatgacatcactgtcacagatggtgctgattgggagctccaggtcagaggatggaatgaccaggaggctgacacattgggaacaggggaggaagaagcaggtgccagagatttggcaggaaagacagcaggctcaggagccctgtgtggacttggcctcctagagaggggcagccagggatctgtacaacatgcagagcaagggaggtggaagtcatcatcagcatggttgggtggagtcccaggtgtccagctgcccattcagcccatcaccgagctgtctaatgggcattaagacttagcatggccccagtgagctctagatgcctggctgagccaccatcactttgtgcccagatcatttcattagcttcctcatcagtctccctgcttctgccctggcccccagctgtgtgtcccctccacggcagccaaagggatccttagtagatgtctgttgagtgcacatacaaatgaaatgtggtccctgtcctcagggagttctcacttaaagaggaagataaggaagaaatcgtcggagttctgagagaccagtttacatgtgaagcaggagctatgggagcacaaaaagagaggcattttagggtatcagggaaatctacagagcgaaggggccattttgattgggccttagaggatgagtaggagtttgctagaggaaacagattagggagagatgttacagatgggggcacaacagcattgaagttggaatgtgaaggtaccctatgtgtttggggaatagcaagtggccagtggccagggctaggggagtggggtgtgaaggggcgtgggtggaaggagataagactaggctctgggactggatgacacaggaccttgaatgccacaggagggttctcatattagtagagttttccccagctatgagcaggaggctgagagacagccagtacattcattctacttccatcttgacctcctgaccttggtttagtggctggctgaagtctcagtttgagaaggatctagaagctgtgcccaggcccattggttagaagtaccattgtcgtgtctgccacaggtatagatgtggtcaggccacatgttcaccaggtccccagaggtgggttgggctcattaggtagatgatcctaacagctttttctagaggtggtgagctcctcctttctgtccttggaagtgtatgaggcagagtgggcccagccctgggcagagggtcgggtggtgtcctcaggtgtcttacagtgtgtttctcttctctctctgattagtgataagatgtttccagctctgggattcggggcccagttacccccagactggaaggtgagtgaaaccggagttagtttccttttggttgagatggggtttgtgtgtgtggcctctcggggatcagctctggaaaggtcttgggctggggccctgttgccctgccttccctgtgttcaccccaggccacgctcatttctcaagcctgatccttgggcaggcactgaggctgtaacggggcagcacgttatgttctctgtttatgagacccatgtggagtgggggagacagataggattgccagatgtcgcaaatcaaaatacaagacacccagttaagtttgaatttcaggtaaacaatgtttatttttatgtgtttatttttatttatttatttatttagagacagagtcttgctctgttgcccaggctggagtgcagtggcacaatctccacttacagcaacctccgcctcccaggttcaaacaattctcctgcctcagcctcccgagtagctgggattacaggtgcccaccaccaccccgcagctaacttttgtatttttagtagagagttttaccatgttgaccaggctggtctcaaactcctgacctcaggtgatccaccggcctcagcctcccgaagtgctaggattacaggcctgagccactgtgaccagtgcagataaacaatttttaaagtataagtatgtcctgaatatttcatgggacatacttatacttaaatcatccattgtttatctgaaattcaaggttttgtatggatctaggggtacaagtatagttgtattacgaggacgtattgtgtgaaatatggacttttagtgtattcatcacctaaataatgtacattgtacccagtaggtggcatttcatccgtcacccctccatcctctcgctgtgtggagtcctcagtgtctgttattcccctctgtgtgtctgttctgtgtgcacccattgtttagctccgtcttataagggagaacatgcagttttttgttttctgtttctgagtcatagtgggcatcctgtattctatatggcaacactaaagacaggtagtgtcatcggtgctgaggtgggggcaccgtaggcctgtggggagccgaggaggtaacccaacccagcttggggccatcaggcttcctggagggggcaagctctaagccaagaggggaaagggaagtagcagagtgactagaggtggcagtggggcagggggagccttcagggcagagaacagactgtgcgaagcctgcaggacgagctggaggaactggcagaggtgggtgatagaccctccattggaggtgagcagggtggagacagatgtgggcgttaaagggccacggggacccctgcagggaccacataggggctcatcagcagattggcatttctaaaggcctctcctggctgctgagtggggcgtggctagggcgagagtgggcagagtggagggtggagagaaggggcgaaggcaaggaaactcagggcagaggccaggactttctgtgtgaccaagtgagtgtgggccgaagaggtcaccaagatttccaactgggcactgaggcgggggtggtgctgcttactgagatgaggaacggggtgggtgctaggctcagcaggggagatggtaaggtgggagtcccaggagaaaggtggatgatggctgggcacagtggctcacgcctataatcccagcactttgggacgctgaggcagatggatcatttgaggtcagagagtttgagatcttcctggccagcatggcaaaaccccgtctctactaaaaatacaaaaattagcccagcgtggtggcacatgcctgtaatcccagctacttgggaggctgaagcaggagaatcacttgaactcgggaggcagtggttgcagtgagccgagatcgtgccactgcactccagcctgggcaacagagtgagaccctgttacaaaaaaaaagataagtggttgatgggtcaatgggtttgggctctggggagacagagagagacctggccacctgggccaggacccatggtgccacctctgggaggatgagattgctagggagacaggtggagtgagaaacagccacatgaggcggggtgcagtggctcacacctgtaatttcatgctttgggaggccaaggcaggaggattgcttgagccaggagttcaagaccagtctgggcaacacagtgagaccctggctttacaaaatttaaaagttggctgggtgcagtggctcacacttataatcttagcactttgggaggctgaggagggtggatcacaaggtgaggagttcgagaccagcctggccaacatggtgaaaccccgtctctactaaaaatacaaaaattagctaggtgtggtggcgggagtctgtaatcccagctactcgggaggctgaggcaggaagatccctggagcccagtgagctatgagtgcactgcactccagcctgggtgacagagtgagactctgtctctaaaaaattaattaattaattaattaaaataaaaaaagagacagctgcatgagagagccaggcagatgaagcggagactgagcccgggggcagagcagggaggaagtgaaggagggaggggcagaaagcaaacccataagtagcagcatttattgggcccttagaatgttctagataccactctgcctgctttaccagtttcaactaattctcaccaaagccaatgaggtaggccctgttatgaacccattttgatcgttgaggaagccaagcagtcagggctcggggaggagggagtggggttggaggctgcccctgggcctggtgaggtaaggctgagaagagaccatccgtttcactgaccatggctggggccattatggcagagacaagatggggaggggagaagggcatggagacatcagccagtgtggcagtcagccagcgtggaagtcaactggctgtgagggaggggaagggttaggtcaagcaggtctaaaggctgaggaggagccaggagaggcgtggaggtgaattgaagcgggggtccctgaggtgtggttgtgggtagtcctggggcaggaggcgggggctcctcatagaaccacgggcaccaggggaggggtggtttggtggctcagagatggagacgtcaatgagggcagaagctgtgatgctggggagtcgctgcagatgggcagggaatgctgtcccattttacagggcaataaactgaggcttggagcctcaaaatgacttgcccaaggccatgttcaccaactgggcagttggactctaaagtttcttctcagacactgttgcctccccatgagaagcctgtggggtgtgaggccagagagctcctaagcctgcacatgggtctcgctcggccagtgccccttcttgtctgccctgctgtgccgcattgctgtttccagagtgaatttttgcctcctgtcctctctggtcctctctggggaggatgattttcacctagaatttcggggagtggcccaagggccagggcaggagatgtgggtgtcctggctccctgtggtgtgaggctacgcctcagatgggaccaaagctgggccacagtgatgccattcggggggcagggcgagctggtgcggctgggcccagcacgagcccgttgctaggacaccagccagctttcaaagaactgaatgagatgttttcttgagcaaaagcctccttgtaaatgtcacagggcgatgctggggaggccagggcttggccaggctggagtgcccggcggtgccaagaaagatgctgcgtccaggctaggaaaggacagatgctgtgtcccacctccccctgccatgggagccgccaggcctggcccctcctggcccctcaccctctctcgcattctgactcgcctcactcctgctgcctgaagctccttcattcactcccacctcagggcctttgcacatggccttcactcagcccgctgctccctctcctgggcttctgccaccgattttcacctagaatttcggggagtggcctgccctctgggagccatgctcacactcacatgggggcccttcttcctgcccagagccctgccctcatggaactctgtgacttgtttgtgattgcctggggaaggcactgggtttctttctgcctgcatcccagcacctggcctgcagtgtgcagtgccattgtttgttgacggaatgaatttgggacccagcccaaatttgggaccccaggcctgagcaaacagaggggtcggttctctgagggtgggaagctagaaggaaccagaaggagcacgtgaccaggctgcctgcctttgagacctcagtttctccctgagggtggcccagatgatcccagagagaactcctgccccagagagtggctgagggtctcaggacgcgtttccctttggagatggcatgaggtcttggcccttcaacgtgagcagagttactcagatgaggaacgggatctgggcagaaggcacagtctgtgcaaaggtctgggaggagggggagcatactctgcaggtggggaaactgaggctcagagaggacagtcactctgagatcccttgggctttctccatgccccacccgctgcctctaccacctgcctcagccagggccacagggaactgagcctgaagtaactccctgacctcaaggctgagccaggccaggttgggtgaacagggccattggctgtcagaaggcaatagggagtcccaggacaaaggcctgtggctggcagccagtccccaggggcccctcatcagcttctgtggcctccaggaacttgttctgtttatgacttttctcaggcaaaccagggcaaccagtatgggaggggctgagctgccactcctggtagcatggacacttgtccccaggccccactgtgtgacctgggcactccctggccctctgggaacctcactctttccagctatgaaatggagttgctggaggagacaacctctggggcctctggggcagatggacaaccttccacagcccccctgaccgcaaggctgggccctccccaaataaagaggggggaagagtggggatgaagagcggggggcccgagaaggcaaaatattcctccacccctatcagcagggggctttcccactgtggtctctaaaatctcctaaaatctgatttttcaggaagactttggcccaagggagtcctgtttccctggcaaccattttctctctcagcccctccatacaagcccccctcgtaatctctatagaggctcaggaagtctccatggcaacagggacctccagcccccaaacctggagcccagactggggacagggtgaagtgggccctggacagggacaggacccaagagggacaccaggggactggctctgtgccgggcgcctaaagcagacagcaaagaacagaaaaccccattgcctgaaacggggaggagtcctcccaccacctcccctcccctgggctgccagggaggccagactgaaccccactgctgggtccctgccctctcccccaggagtaagaccaactcccacccccaggggaggggagggcactgggtctcaggcctgttcgactgtgtggctctggtgcctggcttcccttttctgggcctcggtttgtttatttgtaaaatggggacgctggatgcaggagagcctcccagtacccccatcgtcatgtcttggagctgaagagtctgtctgggattgtctgtgcccagacaaaagccctcctcctgcagctgaggaccggggcacccctccaccctcctcattgaaaatccctgggggaggaatgcctttggaggttagcgtgagctctgggagcagcctgacctcagttcgagtcccagctctgcccgccaggaaatgtgggaaaattctagtccactctgtgtctcagttttgtcatccataagatgaggtgataacagctgcccttccattggggtgttgtgaggaaggagtaaggggattcctgcacagcagtgaatgcggatgtggtacatggtaggaagggggctgagggggatttggggctgtggggctgcaagagagggaagaaaggagggactgtcccccatctgagctctgcagcgtctcccgaggccttgggttctgcaggcactgcagtctcacccacagccctgaacggggccagttatgagtccttctataccccgaagccatgcgagcagcagcagccggatgtgatgggtgcagcagtgtcccggagtgtccgggtcagtctctgatgatcctctggggctgggtgctgggcctggaggcagagaagcaggatgagtccctagggagcctatgatagccccatctgatccccttgcagcccccttacactccctgatcgccaggtcagctctgagtgggctgtcagctcacccccgtttggctgtctggcgcaaggcaggctcccctctaagcccctttgcttactgttaaggtaggaaaagcctctgaagcccagagaagcggtgctctagttgtggagcccacatccagctgtagcagtgatgagggagcatcctggaaccctggcccacagggaaatccctgtcccacccgggactcttagaggactgatggggcataggcagccccagtccccagaagagcccagggtgacctgccagggtctcagtttcctccactatgaggagagggtggttgggcctctctgtgggtcacacccagcagtggaggtgaaaagcagatgtggggggtatcagtggcctagaggagggtaggggtgggggttatgagccggtgctctcaaagggagccttggcctggcagtgggtggtggcctgggtctgggtttgggggcgggaggctgcagctcagcgttttctctgcgtttcaggtctcccatgagtttgccatcaacttcaaccccaccaaccccttctgctcaggtgagtgtcagacccacctgcagctgccctgtgtttgctacgggcctggccagctccctgggtggagggagggcagaggacaggttttcatttctttctcctttcccctcccccttactgttgctcagagtgacagagggggaagagctgcagtttggagtcagatagtcctggattcaaggccagctgctgcccttcctagctgtgggaccttggaaaggtcactgtacctcctgggcctttgcctccttacctgctccaggataactatgacagctgctcttctcactttactgggtggttcagtgagaattacaggaagccactgacaggaagtcctgtgtaaaccaggaggaggtgagggtggcaccagacacacctgctttcacctccttcccacccgcccccttgctgggaaggccagccctgctctgggagtacttggcgggggatcagggggaggcaggggctgggaagtgagtatggtgtctgtgttcatccccacccctgggcctaagaggatttctgagcctcctagggacagttaagaaactattagaggccggatgctgtggctcatgcctgtaatcccagcactttgggaagctgaggcaagaggagcacttgagcctaggagttcaagaccagcctgggcaatagagggagaccccatttctacaaattaaaaaaattacccaggcatggtggcatatgcctgtggtcccagctactcaggaagctgaggtgggaggaaagaaagagagatggggaggggaagggagggtcacacctttaatcccagcacttcggaaggccaaggtgggtagatcagaggtcaggagttcaagaccagcctggccaagattgtgaaaccccgtctgtactaaaactacaaaaattagccaggcgtggtggtgcgcacctgtaatcccagctactcaggaagctgaggcgggagaatcgcttgaacccaggtggcagaggttgcagtgagctgagatcatgtcactgcactccagcctgggtaacagagtgagactctgtctcaaaaaaaaaaaaaaaaaaggaaggagaaaagagaaagaaaggaaagagagagacagagagaaaggaaaggaaaggaaggcaaggggaaggggaagggagaaggagggagggaaggaggaaggcaaggaaggaaaggaggacagggagggaggaggggagggagggaggaagaaaggaagaaagaaagaaaaaggaagatgaaagaaggaagggagggatggaggaagggaggaagaaaactctgagtggaggagaggggatgcaggtgggtatggaagagggctgtttctatcatcatgagacctttccgcctaggacttggcttcaacatagcatctaccttccctggggatccccaaagctgggccaggctgtctgatttggggtagatctccagagacattttggtcaatcagcttcatccctggccaggccttctgggcagggctacagggcagtgtgctcataacagcagctatttacagagcgcctactctgtacaggcactgtgcgaacgccttgatcccccaaccacgaacagaagccatagcatgtccagaatggacctccagatggcttcccatggtctcaaagcatcactgcaagcttcgccaagccccttctctggaaaggcctgagagacccccctcctgccaactgccagagtgtagattatcagtcccattgacagacaaagacgtagcctcagaaagattaaactacttgccccaggtcccacagctaagaaaggcaggatttaggctggacacggtgactcatgcctgtaatcccagcactttgggaggccaaagtgggcagataacctgaggtcaggagtttgagaccagcctgggcaacatggcgaaaccctgcctctactaaaaatacaaaaattagccaggtgtggtggcacatgcctgtagtcccagctactcgggaggccgaggcaggagaattgcttgaacctggggggtggaggttgcactgagccgagatcctgtcactgcactccagcctgggtgacagagcaagactcctctcaaagaaaaggcaggattcaaactctacaggcctgtctgacttcacattcagggctcttggctttttaccatgctggcccttccctctggcagcttccagtctgtctcacaaggcctatgctagccatggcagggacattttgggtaagcatgaaatagatgtttcatcagcagtgagatgagagtgggtatggggtcagggagacctggctgatccagactcttctcccgaggcaggtgtggatggtattgcccaggcgtactcagcttgcctgccccacatccgcttctacggtcctaccaatttctcccccatcgtcaaccacgtggcccggtttgcggcccaggccacacaacagcggacggccacggtgagtaggcagctgcaagccagtcatgccaggaaacacgcacgtcctctgggctggggggcaggatattctgccttctctttgctttaaatcctagtggacacctctgggccttgctttaccttcacgtattgtaaaagttgagtcaagctcaacttgattggtcctggcttcctggagcacagactggagaaagcaaatccattcgtgctgagcaggaagcagggctgtgatcaacgggagatgtctccccagggcgaggtactggttattcccacaagagtaacaagatggaaaactggaggcagtgatccctgaggccctaacgctgacccttctgagccacctagttccaatcagagctgcccctgccttacactgagggctgctgaactgtctggccctggccctacactcagcaacaagcctagagcctcactggcccggctgaggctgccaaagtagctgcgtggcatctggaatatatggtaagcagccatcccaggcatctgcaaccgtggtctcccttcccttctcccgcccccagctgcaggctggctcccaggcaggccctactggcagggtctgatgccagtggtggggtcaccaaaggtcaccttgcccacctccccatttccaccatgacctgcccttgcctctctctgcagtatgagttgagaggtcttctccccctgccctaagggcagttatctgatgtcccttctgccttctcctgaccttggggacctgactgacctatgccctatgcataggacttctcagcccctgactcagccctgctcctcacgctccagcgccgtgacggggaatcaggcacccagcccagatgctggtctgggttgaggagacttgactccattcctttctggccactacctcctgggagacctcggccagcccccacccctttctcatcttccacctccattgaaagaagagggttgctgaagtcacttctagagtgttcatttcactagactctaaaatatcccaaattcacccacttccccatggccacaggtctctcagtggaccctgcagctgccttcaccactcctcacaccaccagtccacaagctaccatttgtttcccccactggagggtcagatccagccgctgccctgccaaaaacccttcgccatcagattggatcccctgaggccagcctctgccttccttaccgacccgatcactgactgcacagccctttccttctcttaggatgattctgccacctaaccccccgtgtgttcctcgagcactcctagctgttcccccgcaggtccttcctggactctgcaaggccctccctcagggcctcctcccccaagcagccttccctgaccactatatgaagcagatctcttgccttctctgcctgttcctggctgaccctgatgatggtcggcaatgtctagttcacatccttctctccgtgcctggtccagtgcctgggctgtgcaggctcatcgtgctctgtgaatggatgaagtcagcactggctgagggatgtcagttgtacaagctcagtcagagcctcctcccccagggaaagggacctggtcccatgcctaaggggaccattgggaccagccaagggagggaggcacctggtcaccagggaggtggcagttgacttccgggaggtggtgggaaagatagtgcaactgcccagtgggttcaccttgcctgctgcctagaaagaatgatttatcaagacaggggaactgcaatggagaaagagtaattcacagagagccggttgtgcaggaaaccggacttttattatttctcaaatcagtctccccgagcatttggggatcagagtttttaaagataatttggcgagtagaagcttggaaagtggggagtgctgattggtcaggctggagatggaatcatagggggtcgaagtgagtttttcttgctgtctgaagtgagtttttcttgctgtcttctgttcctgggtgcaatggcagaactgactgagccagattaccagtctgggtggtgacagctgatccatggagtgcagggtctgcaaaatatctcaagcactgatcttaggtttcacagtagtgacatccccaatttggggaggttcagactcttggagccagaggctgcatgactcctaaactgtaatttccaatctgtagctgatttgttagtcctgcaaagacatactggaccccaggcaagaagagggtctttttgggaatgggctgttatcagtttgtttcagagtcaaaccgtgaactgaatcccttcccaaagttagtttggcctacacccaggaatgaacaaggacagttgaagggttagaagcaagatggagtcagttaggtctgatttctttcgctgtcataatttcctcagttataattttgcaaaggcggtttcaataggagtggggagtggcagagcctcttctgatggttcaggaggcagtagagaatctgtgggaaaaatgggtaccctggagtggcgggtgccagggtttgaatcctgccgctgtcccttcctcactgtgtgacttgggcaagtcacgtcaccttagtttcctcatttgtacagtgggaaaactaataggatcaatcaggaggaggtagtattaggattaaataagatcactcagcacatggcacccaaaaagacctgagggacggagaaggacaggccagcaaagcgctcagggaagagtggccggggtagagggaacaggaagcgcagggcgtggaggcagcacccggccagaaggagctcagagtgccagaaggagcttcccggccctgaccctggcaacccggagcctggggcatgtttcttcttatggaatggaatgtttcctgctctaaacccatttcctctttttgttttttgagacagagtttcactcttgttgcccaggctggagtgcaatggtgcaatcttggctcactgcaacctccgcctcctgggttcaagcgattctcctgtctcagcatcccaagtagctgggattacaggtgcccaccaccacgcctggttaattttttgtatttttagtagagatagggttccaccatgttggccaggcctgtctcaaacccctgtcctcaggtgatccgcccgcctcagcctcccaaagtgctgggattacaggtgtgagccactgcacccacacccatttcctcttatgaaatgggcgtagtaaacccccagtgtgctgtgaggacctgggtgcaggcttaatgggcagtaactgggaaaggcctgggagggatattttttttttgagacaaagtctcattctgttgcccaggctgaagtgcagtggcacagtctcagctcactgcaatcttcacctcctgggttcaagcaattctcctgactcaacctcctgagtagctgggattacaagcacctgccaccacgccgggctaatttttgtatttttagtagagacagagtttcaccatgttggccgcactggtcttgaacttgtgacctcaactgatctgcccacctcagcctcccaaagtgctgggattacagacctgagccacggcacccggccgggatttttttttttttttttttttttttttaattcctgggtttgctgggctagaactggctagagagggcacagcaagaggcaggcttcaccttgcactccctcctgttcgggtgccaggccattgtcccacccagtcttgtccaccctgagcaggctttcaaagggatagaaaaagaaagtcttgcatgttgtttaaggggaaaaatgtggggcagggagcgggcgtgcagcccagtgttagcgccagggccctttcacagctgcacctgcagagctggggcaggactgggcaggaaccagggtcctggggagaggtgggtctgtgtctgctggacccaggtctgagggggtttgggccccaggaaaggccaggaagggcatttgtgtgttctggggagcagctgcggagagctccccagagggaagaagcagaaggacttgaggcccaagcacctggtgctagtcctctggacatcccagccacttttgctgcgacttggtcctcccggcctgggggaggcagccacctcctggctcctttctgctggaaaagctctgtcacccacccaggctgtgtgacctcaggggatgtctgagcatctctaacctgcaggagtggggccaaggggcctcttatcaggctctcccactctgatgtccaagaacagataaggccattctctacctcctgccttaccttatccccttggcctcagggtacaccagtggaggggaggtggggctgcctggtggttcagcctcaagctctgggaggttcaaatcccagctcccccacttcctgacttcgtgggaccgagagcaggtagcttaaactctgtgaacttgtttcctcatctgtgcgacgaggataatggaaacagtccctgccttctagaactagataggcatagaaattgctcagcatagtgcctggcacacataaagtgcttccctgctggccgaatcttttggggacacctcttgagctagcattcagtgatgccaagcacaattagtcccaaagcaaaaggaagtcatttatgaattatcccctgatgcttttgtcagccgttttttagtttggggaagaatatttggtgtggcttcaccctccccatccccagacatatgtgcaccgatgcacacccacgtacaggaaattgagagcaggtggtggaagcctctctctaggcagggctgcactctcccattcattcactcaacacatctttaccaaccaacttctgtgtagcactggggagaccatgatgagtgacacagggcctctgccctcccagagcctgcagtctagtgaggagccctaggccaggagcaggaggcagggagactaagcctgaggcgatggaagcacgggctcacagaggtggcatccgacccagatggagggctcaggaaaggctttttgggaaagtgacatgtgagctgaaacttggaggatgcttgagttagcctcataaaggatgtgtgtgcgtggagtgtctcaggcggagggaacggcacgtgccgaggcctggaggtttggtgtgtgggtgtatcggaaggaaggaatgtgttgaaagaggaggaggtggggtgaggtgaggctgaaaggtaggccagctcctgcggggcctcggaagccattgaggaacctgggttttctctggagggcggtggggagccactggaaggtcttatgcaggtttgagtgagccttggggggactcctatctcaggccttcatctttccctctgccttggcccctgagacctgggccttgctattcatggcccattcctggttggtcacccaggtgtctggtgtcccagtggagggggagctgggaagcacccagccagctccctggaaattccacccgctcccctcgcagggtcctcagctgccaacttccctgaaatgagctagggagtaagtgcagcttccctagactctgcctggaactgttgtggtcaagtcaatttcttataaatcaaatcaaacgttaaatgcattaggggaagcagttgtttacagccctagaaacctgaagaacctcggagtaaaggcaagagttgcttcatccttgttgggagttgggtttttggattcaatctgacagtgatgggctgtttctggaggtgggaatgctggggacagggtgaaccaggaccacctgcagggacaacagagcctgcagagcctcttccaaccccttgcacccgattccaccctccgttctctccatctacagccccttcccctttgatctgtcctgggggtagggctgtgtaatagacgtttgaggctcctgaacaactctggctttgtccaggctgggcgggaagccggggacttgtcagctgcacttccactgccgaggtctgggctgctgacctcaggcgcagctgggcacttgctgaggccaagcccctgtgtgtgggcatggtggctggttgattggcacataggggtgcgggttaaagtccagtaccagggctctgggccccaccctgggctgctatcctggatattcaggccctcagacactggcatgctgggtgggaggaaagcttttccctgccaggcccctctgttggagacaatgacagaccactggtgccagtgggcggtggaggaggacatcatgtaaagagccccagcttcggagtcagccaggctgggttcaatctggactgtgccagttcccggctgtgaggcctcaacaagttacatcacctctctgagctccactcctctagaatgggagtcagcatgagggtgacaggcagggtctgtgtagtgctgtcactgtgtggtatcacctcctctggccactggtgcccacagtcctgcaggaacctggccctgtctgcccccaggctccccagggaggagggctgccagctaagaggtaggcccaggcctgagccccacgcatctcctaggcacgggggctgatagaaacgagggagccaggagggccacgtgtggagggagtgggcactgcctgcctgagctggaacgggcttggaaacagatcccacccactgaaaggtgtggcccattagaccagtgaccaagcattcttttctttcttcattgcccggcctcttagtgtctttctacctatctgcttaggtgtcccagaaatgttgccctggactgtttctgatggtattgagtgtggggttggagggccgcctaagggaaggggcccaggaacagtggtgggctgtcaagggtagggtctggatgggcttctgaggcccctcacagccagggatggggggctggcaacagcagccctccactgtgggattcaggccaccatctccatggcaacaggtatccccagccaagggattggtctcttaaaggcacagtgctggagctagaccactgctgcctggagctgggggtgagggtggtggggtccgtgtctccacacagctcaccctgctccttccctccactgttgtacttggggggcagacaggaacaaggcaccctggaaggctgagcttgtagcctctgcaacctccccagggaacaagtggctttgctggatatgaaggtggctaagggctgacctggggtccagcttgtgttccaccctccttagctccatgaccttgactagtctaggccccagtttcctcttctggaagactaaagccccaaacagagaatatgaagaccacaagagctgatctgttgatgttacggatgggggaaactgagcttcccctaaaggggtcagcgggtactaaggacagagctgagctgaaaataagttcttggctgggcgcggtggctcacgtctgtaatcccagcactttgggaagccaaggcgggtggatcacctgaggtcaggagtttgagaccagcctggccaacgtggtgaaaccccaactctactgaaaatacaaaaattagtcgggcatggtggtgggtgcctgtaatcccagctacttgggaggttgaggcaggagaatcacttgaacccaggaggtggaggttgcagtgagcccaggttgtgccagtgtgggcgacggagcgagactcagtctaaaaaaaaaagaaaaaagagttcttggccaatttggaatcctgggccctcaccctcagatggtccaatgagccttcctgcacttcactcaggcacaccccggccccacttcacagtttgtattttatatatctcccacactaattattcaatttttaaaatttaatttataaagaaactctatatcccattgtaaatgaaaaaaagcagtatcacttgccataaatagagagtaacaaaaataaacacaacaagctgtacaatggtattaaagcctagctggagactattgtctcctcaagctctgggcttcctgccttccctttccgttgataaggaagcttagcaaatgttagagagacgtgaaagacacagtagtaccaaaccaagacttgctcctgggtgcagttcatagaattgaaaggccactgcaaaccagtcctcttccggggtgacttgatgacttgatggtgctcagtgctgtgtttgggatgtgactcaaatccacttatttgtcagcagagtcccacactcctggaagccctggcccagacgacctgctttagctcccgcaaggtgtctcagattgtcgtgttgagtagggaatggagggggtcacaggtgcccatgcccaggtgcagcagagagggggagaccggtcccagagcagcccatcagccagatgagtccccctgcgccagccgtgggcctgtcgggaatgcagctgactgggccactgccacgtcaggcacattatctgcaacaactcccactttgcagatgaagaaactgaggcactacgagtcaagtcagttgcctagagtcccacagtatagcaactggcaaggccaggcccagagtccagggctctcagaggccccaagggggagtctaagataacacacagggcaggaggggagagcagtttgtacttcctgctgtgaccaggtcagagtttagagcatgagaggcctgcaggggtggggtgctgagagcaggacgcatagtgagttgtctgggacttggctgcagctgggtaagatgcactgccttcctccaggactcggagggtttgggatgaaggagggagggagaaggggtgccagagcctcgaccttgctgagtgccccgttggccccctccctgcagcagtacttcatcctcctcatcatcacggacggggtcatcagtgacatggaggagacacggcatgccgtggtgcaggcttccaagctgcccatgtccatcatcatcgtgggcgtgggcaatgcggacttcgctgccatggagttcctggatggggacagccgcatgctgcgctcccacacgggggaggaggcagcccgcgatattgtgcagttcgttccctttcgagagttccgcaacgtgagtgtgggcctgggctgggagggggcggttacaggatcccagccaccatagctcataatcaagcttgagagtcttggggttgtctggcccaatcctagacttctccactccattgactatgctcttctgagggcctgccatgtgccaggcgccgtgccaggccttgccccggtggtggccattgtgatagtgtgagcacttgcttccacaaactgatggaacatggagccgtgggcatctagcctgaggctctggggcagggcttcctggaggacctgccctctagtggggtctgatgagaggctggggctatccatgtggtgtaaagtgcaggaggagagaggggttttcctgatcatcacgccccagcaagccccctcattttgtagacggaaaacaaggcctcccagtcatcttaggttgacctcctctccctaaagccctctgcctgggagaatggtgtccccagccttgttcctggaagtggctctggctttatttgcaggtgatcccagatctgcccacaaggaggccggggttggcctcctgatcactgccctagcagcagggtccatgaggagtcccataggggagcagtctctccactgtaccgctgtactgtaatgccacccccatactgctggctgggggcttaacccagcctcagcaagaactgcccatgctggtttgcacccagtggccctcacctctcttcccagcatcctctggggttgcctgcgatggttctactccttcctctggagcattcgcttcctaaggacaaacctgggcatcggtcaccccttcatgcacaggtcggtgaccgagtacctccatgtgcctggcctgtggctggctgttcactagtgaaccatactgtcaggcccatttattcccgccaagaaggtgctcaggagatgtttgccggacacataggtgcttcccgcagacggagtcatcctaacccgttactcccaagcatctcaagtgctccaggtaacacttacacctaacctaaaggaaggcactgcgatcagggggaatttcaggcctggcctgggctgagatgagggatgccacttgcagacagccctggcccgcagccctaattttgtcctcaatggacacctgctgtagcagccctctgggcatagtgccgctcacaacttccggtcattaatccttattctctctcttccccaccccaccctcctccaccctgcaggcagcaaaagagaccttggccaaagctgtgctggcggagctgccccaacaagttgtgcagtatttcaagcataaaaacctgccccccaccaactcggagcccgcctgagctccagtgcccagcagcagcatgtcagctgagcctcctgccctcccccaggaacatgcacgctcactctgcttccttgtgggtggcctttttttaccgatccccttttttattttttacaaccggacctccacccccaacttcctccagcccagctgggcttcctttgttggagtcaactgttgatgcttccaggccaaactggcttcctctcctcctctccccacctttgccattcttaagtattgaatgtactttgtataattttagtggaattgttattgagaataaaatttttacaatcataac

SEQ ID NO: 380 - DNA, 390 bp, Homo sapiens
tttccaagtaactagctgcagactctgatgaaagaaacatgtccttggtgcatacgtgtcgtagcctgcacctaattaattcctgctgtttttttaatactgtgactgtgttctatttgttatatgctcagggtaacaaatgagtttcagacgtccctgcgtcagctccttcctcagcagggacctgacgggctcactgatctaagaaaggaaatggaaaatgaaaatccaccccacaagtctaataagttggtgtagtcacttctgcatggggacatgcattccagatgataacctgttaaatcactgccagttaacagtgataacctgttaaactggcacagaacctggcacattgtacaaactcaataaatattcatggatgaatag

SEQ ID NO: 381 - DNA, 1871 bp, Homo sapiens
ctcctcatcatcacggacggggtcatcagtgacatggaggagacacggcatgccgtggtgcaggcttccaagctgcccatgtccatcatcatcgtgggcgtgggcaatgcggacttcgctgccatggagttcctggatggggacagccgcatgctgcgctcccacacgggggaggaggcagcccgcgatattgtgcagttcgttccctttcgagagttccgcaacgtgagtgtgggcctgggctgggagggggcggttacaggatcccagccaccatagctcataatcaagcttgagagtcttggggttgtctggcccaatcctagacttctccactccattgactatgctcttctgagggcctgccatgtgccaggcgccgtgccaggccttgccccggtggtggccattgtgatagtgtgagcacttgcttccacaaactgatggaacatggagccgtgggcatctagcctgaggctctggggcagggcttcctggaggacctgccctctagtggggtctgatgagaggctggggctatccatgtggtgtaaagtgcaggaggagagaggggttttcctgatcatcacgccccagcaagccccctcattttgtagacggaaaacaaggcctcccagtcatcttaggttgacctcctctccctaaagccctctgcctgggagaatggtgtccccagccttgttcctggaagtggctctggctttatttgcaggtgatcccagatctgcccacaaggaggccggggttggcctcctgatcactgccctagcagcagggtccatgaggagtcccataggggagcagtctctccactgtaccgctgtactgtaatgccacccccatactgctggctgggggcttaacccagcctcagcaagaactgcccatgctggtttgcacccagtggccctcacctctcttcccagcatcctctggggttgcctgcgatggttctactccttcctctggagcattcgcttcctaaggacaaaccctgggcatcggtcaccccttcatgcacaggtcggtgaccgagtacctccatgtgcctggcctgtggctggctgttcactagtgaaccatactgtcaggcccatttattcccgccaagaaggtgctcaggagatgtttgccggacacataggtgcttcccgcagacggagtcatcctaacccgttactcccaagcatctcaagtgctccaggtaacacttacacctaacctaaaggaaggcactgcgatcagggggaatttcaggcctggcctgggctgagatgagggatgccacttgcagacagccctggcccgcagccctaattttgtcctcaatggacacctgctgtagcagccctctgggcatagtgccgctcacaacttccggtcattaatccttattctctctcttccccaccccaccctcctccaccctgcaggcagcaaaagagaccttggccaaagctgtgctggcggagctgccccaacaagttgtgcagtatttcaagcataaaaacctgccccccaccaactcggagcccgcctgagctccagtgcccagcagcagcatgtcagctgagcctcctgccctcccccaggaacatgcacgctcactctgcttccttgtgggtggcctttttttaccgatccccttttttattttttacaaccggacctccacccccaacttcctccagcccagctgggcttcctttgttggagtcaactgttgatgcttccaggccaaactggcttcctctcctcctctccccacctttgccattcttaagtattgaatgtactttgtataattttagtggaattgttattgagaataaaatttttacaatcataac

SEQ ID NO: 382 - DNA, 390 bp, Homo sapiens; identical to SEQ ID NO: 380

SEQ ID NO: 383 - DNA, 459 bp, Homo sapiens
ggggtccgtgtctccacacagctcaccctgctccttccctccactgttgtacttggggggcagacaggaacaaggcaccctggaaggctgagcttgtagcctctgcaacctccccagggaacaagtggctttgctggatatgaaggtggctaagggctgacctggggtccagcttgtgttccaccctccttagctccatgaccttgactagtctaggccccagtttcctcttctggaagactaaagccccaaacagagaatatgaagaccacaagagctgatctgttgatgttacggatgggggaaactgagcttcccctaaaggggtcagcgggtactaaggacagagctgagctgaaaataagttcttggctgggcgcggtggctcacgtctgtaatcccagcactttgggaagccaaggcgggtggatcacctgaggtcaggagtttgagaccagc

SEQ ID NO: 384 - DNA, 8280 bp, Homo sapiens
gaaaggaccagtcagtgagctgacacttgaatgaaatggagttctcggccgggcacggtggctcacgcctgtaatcccagcattttgggaggccgaggcgggcagatcacgaggtcaggagatcgagaccatcctggccaacatggtgaaaccccagctctactaaaaatacaaaaattagctgggcatggtggcgcatgcctgtaatcctagctactcgggaggctaaggcaggagaatcacttgaacccgggagttggaggttgtagtgagccgggctcgcgccactgcgcttcagcctggcgacagagagagactccgtctcaaaaaaaaaaaaaaagaaagaaatggagttctcagcaccacccttgcaggggcacctggtcctgcccccgaggagtgtgtagggtcaggggtgctggggagaagcagcctggggggcggcctctcggacccctgtctttgccccttcgcaccttgctctcattgccctgctctgtcatcttgtctctactctgtgctctgggcatttccctctgccccatggttcccaccccttgggctcccatcctgtctcctagcctctgcccccactctgcacccctcactttctctgctgtcttcctccattcttctccctttgtgttccttttacctctgcaagggacccttcagaggactttgggcacctctcagccctacaagtggggtatggggctaacggggctgctgggtacccctgtagcgtcctggcaggaaggctctgagggtaacctaagaggcgtgcagcctggctcctctctagggctcccagccacccatggaggcctcgaagtcaccattcctatgggacttaagcctggagcttgagcctggaggctgcttcaccgcgggggcccttaacacaaactcagccaaattgttgtgagctccggaggccccaggggtggtggagatggtgttccttccaagttgctcctaaagtacaaaaccccatgtcctgttaggttgtggcttctactcgaaatggggccacccctgtcaggtttccctgggaggaactggccagcctgcctccctcctgggctaacgcatgctctggggggcggggacccccggggggtgcctgacagggtgtctcctgcttccttgtcctcccagatggagacctcacagacacggtcagtggtccccgctccacagcctccgacctgaccagcagcaaggcctccaccaggagccccacccagcgccagaaccccttcaacgaggagccggcagagactgtgtcctcctctgacaccacccccgtgcacaccacctctcaggagaaggaggaggcccaggccctggacccgccggatgcctgcacggagctcgaggtcatcaggtcagcagggaggggcccagaaaggagctgaggtcctggggtccaacctgtccactcccagcatcagctgttcatccagggcagaccgggacaccccctgagggcagttgcatgccttcctggaaacccttcccacctctaggaggttctttgagcaagaggaagtggaggcctgtcctagtcagctcggctgctggaacaaagcaccgcagacaggcggcttccacaacagacattctttctcacagctctggagcctacagtccgaggtcagggtgccggtgtggccagcctctgatgagggattcacagatgtccctcttctcgctgtgttgtggcggggagtggagagagagctctctagggtcccttttatgagggtgctgatcccattcctgaggatcccaccctcaggacctcatcaccccccaccccctgataccatcacattgggagttaggatttcaacacaggaatctggaggggacacacacattcactccattgtagggctcaagcccttggaagcaggtggcacaggcagcgaccgtggctggtgtctggggccatgtccaggctgccagggcgtttgctgggtctgcctaagatcagaaagcaccttcaggctgtacttcttcccaagggagttcttggaagttaagatacaatttctgagattcattgaaagaaaagtatctttgtcatatgggcaggacatggaaaggaaggacatggtgggtggccagcagggactgtcaaccagagcctccccggctccctgacctccccgaccccctcttaaaacttcacactgactaagaggagaagccctgtgtgcgtgtcagactgcccaggcttgctggcctgaggcgggggattgctccccagtgactggagccaggaggccaccccatgggctggttccagtccacagcagcatcatgctcagacctggggtcccttagctaagcccgctccagccaacctggaaccagagtgggacccggagcgtgagcccagaaagcgctgagtgctttctgggtgattcctccatgatgatgcctgagggaagtgaggtcagctcgggatccacatccgaaggggggctgagtggagggggcattgcctgaccagccatggcctgtttttctttcctagagtgcagctagctcagctgttccattaggaggaattcagtagacccactctggggttcctctggctgcagccatctgtgcccagcccatgctacccccaccccgcccctgccagcaaagggggtgcctcggggcctgagccactgttgtcctctgacccagtgcctccacccagcactgcctaggaccactgacgcactagctgtgccctcagaggctacatggccagcattgccaccgtgacccagcctggttttcctcagcactggactactcaggggttaacactctccccgtcgttactgtcccagggtcaccaagaagaagaaaattggcaagaagaaaaagagcagatcagatgaggaggcaagtccactccaccccgcctgcagccagaagaaatgtgccaagcagggggacggtgacagccgcaacggcagcccaagccttgggcgggactcgccagacactatgcttgcctccccccaggaggagggagaggggccgagcagcaccacggagagcagcgagcgctccgagccgggcctgctgatccctgagatgaaggacacctccatggagcgcttggggcagcccctgagcaaggttatcgaccagctcaacgggcagctggaccccagcacctggtgctcccgtgctgagcccccagaccagtcctttcggaccggctctcccggggatgccccggagaggccgccgctttgcgactttagtgaggggctttcagccccaatggacttctaccgctttaccgtcgagagtccaagcactgttacatcaggtggcggccaccatgaccctgcagggcttggccaaccgctgcatgttcctagtagccctgaggctgctggccaagaagaagagggaggaggaggagagggacagacgcctcggcccctagaggataccacgagggaggctcaggagctggaggcccagctgtccctggtcagggaggggcctgtgtctgagccagagcctgggacccaggaggttctctgccagctcaagcgagaccagcccagcccgtgtctgagtagcgctgaggattctggggtggatgagggacaggggagcccttcggagatggtccattcctcggagttcaggtaacaagactctgcagctggcatgggactctcccagcccttgaagctggggacactgtgcctctgacctccagataaattaagcactaggaagacctagcctgagtgagaaggggtgtgagcctccctccctaactttggctcctagtgggaggcggaggcactaccccctggctctggggtggggtgtggcctctctcaccgctgcctgcctgacatctcgccctcctgacttggccctcacagagtagacaacaatcacctgctcctgctcatgatccacgtgttccgagaaaacgaagagcagctgttcaaagtaagtcctaggaactcaggagtgagcaagagacggcaagggcaaggcgggatgggccaccgcccccgctggagcggcaggagccacctgcctgacccttgtctgcttcggcccccagatgatccggatgagcaccgggcacatggagggcaacctgcagctgctgtacgtgctgctcacagactgctatgtctacctgctccggaaaggtgcccgccgcccccgggcagacagcgggttgtagacgaggctgactctcagccccttttccccagtccccttgccctctgagtgcctcccggctgcctggcatgcagtgatggaaaggcaccccaaggaaggtgttgccagcagccctgagacgtgagcctggggctccctctgtgagcactccacgccattctcctactgcagggcaaggagaggccctctaagagagggggctgtgtctaagaaaatggggcagggggagggaaaagaggcctgtggggataataggccttggggtttcctctctcaggggccacagagaagccatacctggtggaagaggccgtttcttacaatgaacttgactatgtgtcggtgagtccaggccccgcagttgtgcgcctgctgtaggtacagggcttctcaagccacttacccatagaactgcagggcgaggcacggccccttactcccctcccggggttgggcaccaacttaactctcagagaggcttctgtacacgatgctgggggtaagaaccaagcttgaggttgcctcttcccgtgctagacttctgaccgtccctccctcactcatgccagcccctggcctctggggctttacttggtggtggcccggggtgtgcttcttcctccccagcaagcgctcagcctggccaagctgccttctccgccaggcagcagctaagccccaagtgcatgtcacggtgtggtttctggcaggttggccttgaccagcagacggtgaagctggtgtgcaccaaccgcaggaagcagtttctgctggacacggctgatgtggcgctggctgagtgagtggcaaccccgcccctctggaaggattggagagttcgcagccgcccataggtgtgggtggcctgggggtcaggggtggaggtggaaagtgggagatccaggaggggaaaccagatgtattccctctggaacctgcatctgctcagagaggcaggcaagtagacgacaatcataggactcatgtggtcagcccaggtgacctcagcccctggcgactcttgggggtgctagcatgagttgttggacaggaaggcaggcagagagccatgctgctgggccaggcgtgcccttgaacgcctgcatccttgtcgtggctcaaggtcccacccgttgacgtcctgcccaccctctttgtctgtcttccctcactgtcaaaatccaaggccccttggccattgagaacgatcaggcctgttccagttgtcatttgatgaccttggacctgcgtcattgccgcacctgccgccctggtcactgggtctagccaggtctctcccccaagtttctgtgacccctccaggccagcagcgctcaagactaagccctgtccagttgaggccctgttcccaggcctctaaccacaaacctcactccctatgcaggttctttttggcttctttgaagtcagccatgatcaaaggctgtcgagaacctccctaccccagcatcctgacggatgccaccatggagaagctggcactggccaaatttgtggcccaagaatcgaagtgtgaggtaagaacctggggaggaagctgagtgcagcccctgagatggcagagcagcagccgccttggcgtgagcgttaagggatgcacgtggatgtctttgccatttcacaatcgcctacctgggcggggcggggcggggcggggcggggcggggctttcccaccctggaagggaggaaagtcatgtccaccttcctacctggggtgtgtcctaaggttaagacaccctcgctcggcagggcacagtggctcacgcctgtaatcccagcactttgggaggccaaggcaggcggatcacctgaggtcaggagttcgagacccgcctcgccaacatggcaaaaccccgtctctactaaaaatacaaaaattcagccaggcgtggtgatgggcgcctgtaatcccagctacttgggaggctgaggcaggagaattgcttgaacctggaagatggaggttgcagtgagtggagatcacaccactgcagtccagcctgggcgacagagcgagactccatctcaaaaagaaaaaaaaagaaccagtccgggctcagccacctgcctggcccaggccttacttgctttgtcccccgtgcccgcccccgcatcaggcatctgctgtcaccgtgcgcttctacggccttgtgcactgggaggaccccacagacgagtccctgggccccacgccctgccactgctcaccccccgagggcaccatcaccaaagaaggcatgctgcactacaaggcgggcacctcctacctgggcaaggaacactggaagacgtgcttcgtggtgctcaggtgggagccctggcagctctaggcctggggcttgggccctggggtggctgggctgtcaggtccccagcggggatctctccgcagcaggtcactgagggagcagcctgaggagaggacgcctcccttccctaccagagcttggagttgacttagctcaggctgttagagcttctctgtagagccagtcatctttggggccccaggaatccctgagtgcctcaggggaggatgcaggcttggtcccccgatgaaccttgagctgcgccccaggtctgctgaggtggccacattccctgctgggcccccaggcccttcttcaccctgccttccgtagatgacagcccctggtgtcctttgcctcaggttcatggccgcagcatgtgcgtgggaggggaaccctgggacctgggctccgcctggccccagttcctgggacaggcctcactcgccctgtgttgtgcccctgcagcaacgggatcctctaccagtacccggaccgcaccgacgtcatccctctgctctcggtgaacatggggtaagtgtcccgggagaagcgggtgtatcctggggcccagagctgccgtttccctggtttgagatggctgcccctgttggcagttcagcctcgccctcaaccccaccccatccagcggccctgacaggtggcctggggcttccacgctctgagggctgcaaggagcccacaggaggggaggagggaggcagcaaggagctcctggcttagaacaggtccagtctgatgggggaggcaggcccttccccagaagctcccggcctgatgggagatggacgttcgggtatttgggaggaacagcaggccctcaagaggaagcatgcgtgaatgaatgcggccgattctcagagggccagtgggacagctgattcccaacccctcctggccatgcttgggtatctagaggatcttgggcatcctggaggtgaaaggcatcgcacagcaaggcggtgggtggggctcccagacctctcctgggagctggaggggcctggagaaccctctggtatcctccagcccccaagacggtggggcagaccctgtgccgcacaccccgcaccaaccctgggggctgtcgccccgtgctgcccttgcctcctcgctcccgtttcaccctcctcctctggcccaggggggagcagtgcggtggctgccggagagccaacaccacggatcggccccacgccttccaggtcattctctccgaccggccctgcctggagctaagtgccgagagcgaggccgagatggccgagtggatgcagcatctctgccaggctgtgtccaaaggggtgagcttcgcctgcccctaccgctcacctggcttgcctgacccacccagacccccagggtcccatccctaaacccatagtcacagagcaacctgagggccaagacggacctccagggggcagcccaggaatggaccctggagctcagaggcatcacccccatccccgcctctgctcccgatccctggagggagatccctggagggagagcagaagggctggctggtcccctggagtgtggacttctggtgcagaccagccctggaggccccagcctgcctctcccctgccccgctgccaggtcatcccccagggcgtagctcccagcccctgcataccctgctgcctggtcctcacggatgaccgcctctttacgtgccatgagga

SEQ ID NO: 385 - DNA, 18535 bp, Homo sapiens
agttgcagagctattttgctgcatgtgaggatgagatccctgccatccggaaccatgacaaggtcctacagcgtctgtgtgagcacctggaccacgccctgctgtacgggtaaggtggaggaagtttccaaagatgacggagcacaacccaggccatgagtagcctccacagagaaacccttagcctctctgccttttctttcttctctccccttggcagaaagggatttgtcccactcaagtgggccacagtctctctgtagttaccccagtaaatcatctctgggcagacataaatgatggagggaggatttgccacaaatgatatgatggtgtgaaggtgtgctgggtgcctgggagacctgctggggatccatcacttcctgccttgcgctcactgctggaccagccgactgcagcttcccagggtggccccatgcaggtcacagcagctcctgtcctgttttctcagactgcaagacctctcctctggctactgggtgctcgtggtgcattttactcggagagaggccatcaagcagatcgaggtgctgcagcacgtggccaccaacctggggcgcagtgagtagtcacaaggagacgctggggaagggaccagctccaccttcggtgggtagcttggggctctgtcccaggtttaccctcagggtcagccctgggaggcaaattacctggtggtgtccagtagcagtggggtgttaaaatgccagcaccaggccaggcatggtggctcacacctgtaatcccagcattttgggaggctgaggagggaggatggcttgaggccaggagtttagaccagcctgggcaacacagtgagaccccatctctacaaaaatttaaatattacatggatgtcttggtacacacctatagtcccagctactcaggggctgaggtgggaggatggcttgagccccggagtttgaggctgcagtgaggcatgaccacagcattgcactccagcctggaagaaagagtgagaccccatctctaaagatttaggaaaatggccgggcacagtggctcatgcctgtaattccaacactttgggagggtaaggcaggaggatcccttgagcccaggaatttaaggctgtattgagctgtgatcacaccactatactccagcctgggtgacagagtctctgtctcaaaaaataaaataatagtaataaataataaatttataaaatgccagccccctccatgaggcctcttttctccccacatatgatggttttttggcacagcagtgatggggagaaagagggcgagctgccagcgagagctggactcttatggaatcccagcctgagcacgtgctatggagtctggtttctctccctgagctgggatcactgttagcctacaggatcagtgcagagtcctggcgtttcttgacctgtctgaagtgtgcagtctgccctctttatcagaatttcctggccagctacatgctgaggtctgactaggaaaataaagcactcaggggttatggtaccccaccaagcacaaaggccactgaagtgcctggtcccattacctgctctttctttcctttctgcgcttgcttggcaaataaaagccagcagtctgagaggccttcctgccggttactcctgcctttgtttgcaggccgtgcctggctgtacctggccctcaacgagaactccttggagagctacctgcggttgttccaggagaacctgggcctgctgcataagtactacgtcaagtgagtgtctgggacggtctgtctcccctagcctcagagctccctttcagctacctcccaaaggctcttgtcatgcagacagcacagtgtgccacatcagtgatgccagagagccattagaaccttgccagtagctgggtagccttcaccaggagcaccggtgtcccatctgggctcctgggtacagtctgggtctctgctgctccctggtcctcctcccaggcttcagacctgaccagtgcccatgctttggctcagcctttgctggggttgctgcaggaacagagtgtgtacagcagctgctgagagcctgacaagccttgtgctcgtccatctctgaagacactggcaggacagtgcagtgtggctgctaacccagtaggagatcgctgagagggtggtgggcaacagctatatcaagctgggtgccgtccaaggtggaggacatcacgtgtcagatttcaacacagctggtatgttggtaaggttaggccaggctggtaaacagacccagaggcaccatcgtggcttctcatgtcttgcaggaatgccctggtctgcagccacgatcacctgacgctcttcctgaccttggtgtccgggctagagttcattcgtttcgagctggatctggtgagacaccagggctctcactgcttgtgggaagcagaggagggggcagggtgggggcagggtgggcggtggcttcatttctcaggtcttgttgagggagcttgttgagtatgactgggcttgagcaaaacttgtttttttgggcgagggaaaggtttcagggtccatcgaattgagtgagaagagaagtgatggcaagaattcctggttcaggtgactttttcctatctccctatccaacttggagaaaagccacattgcctggagtatcttagcccagaagaactggccttcatgtttaggatgtgaagagttagaaggacaaggcagtttcagcctggtgcttctggggttctgaaaagtgtcatcagctccatgaagagccttcagccaccctcttcaagttctcaagtttctctccccatcacaccctgtacaaatgggatgctggcccacatagagccaaagaggctcccaggcacctcttggactgggctcaaaatggatgcagctgccccgtcctaatcaaatgaccttccttgggccaggcgcagtggctcacacctataatcccagcactttgggaggctgaggtgggtggatcacctgaggtcaggagttcgagaccagcctggccaacatggcgaaacctcgtctctactaaaaaaatacaaaagttagcggggtgtggtgatgggcgcctataatctcagctacttgggaggctgaggcaggagaatcgctcgaacccgggaggtggaagttgcagtgagccgagccacgtcattgcactccagccagggcaacagagtgagactctgtctcaaaaaaaaaaataaataaatagagagagagagagatagcgggggcatcaaagggtgtagctgagttctgacagctctgtcttccatcagcctgaagtccacagctttaaaagccaacactattcacattgctcttcttagcagcttttctttgaatttactaccttaagccattgatttcccaaagaggcacatctgtgtctcccaggcctggatcctgctgtctgcagaaggccgctgcacgaggcctcccaccaaacgggcctcctctactctctcctcaggatgccccttacctagacctggccccctacatgcccgactactacaaacctcagtacctgctggactttgaagaccgccttcccagctcggtccacggctcagacagtctgtccctcaactctttcaactccgtcacctccaccaacctggagtgggatgacagtgcgattgccccatctagtgagggtgagtggccccagggcagaaaagctaagcccctgttgtgaaacagacttgaactgcttaagcctggctgggtgatgtcttccttggctagttttggtctggtggctgaaatttgcaattaaacagggctggccatttcccagatcttcatctcctcagagtccctgtggtggctaaaaagtggattctgggcacaaaaagctgaaattatatatatatatatatatataaaatatatattttttaaggttagacccttttccagaaggttctagtcacatgcctgtggcagttttctaagcaaggaaggtttagcagtgggacctggaaaccttgtcgcagggttgagtgttgcctgttctggggagcttgtctgaccccacattctttgcagaaggaggttaagcaacccctagaagaagagagaaccaggcaggtctgaagcgcagggaaaccttgccactgtgtcctgtgtgtccgtccgatttctctgagttccttctgcgctcgctgatgtgtttgggatggtcgcaccctttgcatcagggaccgaggaagaagctgcaggtcattttgttgtcttgacccaatgatttactggaacagcctggtttctttcaaaccttaggccctggtgttcatggataaaactggccattttcccctctttatctcctgtaggagaccagagcccttcatttacttcaccccaccacctcacctccagggaaggggatcccagccccaatttagccctggggcaccctagaattgcctcagcattgagaccttgaccttcccctttctttatttctgctgtaccacgggttatatgtcccaggaagggaggtccctctcaaacttgctgttagcaagacctgcattgctgaccgtgcaagctgaagaaggcggcacagtctccttaggttgggcccatgggccaccttagaggagttggaggggtgggccttgccggaagagccagggcaaggatggatccatggatggaggtgtcccctcagcaatttggagattgtgcaactgcagctgccagggcagtgtctccttgccctgctagggtatggagggaaggcacgtaagaggtagaaaacaaagctaggcacaggcagccaggcttctctctgccagaaccagcttctggatgtggaaaggggtcaccctgacaggtctttccagctggttggaggctcctgggccagcgcctgagctgagaggcagtcagggccctagtaagtttccccaaggttgttggatacaatgtagaaagttgaagttttcctctcctattttctccccatgtctcccaccccatttcccctcccctccctccagtcatccttccactgcctgtgtttctaatcttcagttttgtccctcgtttttgtagattatgattttggagatgtgtttccagcagtgccgtctgtacccagcacagactgggaaggtgggccagagtccgctgttaccctcttttcctgttttgcaatgtttccatgccaagcttgctgcatgtatcaaatcagctccttattatttataataatatccataatcataataaagccaagtttggtgttctaatagatggaattctgcagtgggaaaactcaacctctagccataggcaaatcccttctcccagtgcagggctcctgcctttgctcagtggcctttcggagtcactaagtggctgcatttcgggggatacagggtcacccttcctgattccagtgccagctgatgctctcggggtgtgtagggcctgacccagtgaaccaagacttgttctggaaaaccatgcctttaaacatgcgggttgtaagctcctgcgggtcagatgagcatcgaagagaaagagcttgattctttcagtctgttcctaatggcttcctcttgggtgttttggagtggttgaggtccaagtcaggaaactgcccaggtacagctgaaacttcctacagacagaatctctttgaagctttaaagcagattaaaaggaaatctgccagccctcccaccctgtctgctgggcagtagcagtgcctgggcatttttctgcctgaaattccacttcataaattcacaaagctattcccaggttgccacgattactcaaagcaaaggctatgttgccaataaggtgaatgtttcccccttaaatctgaggccatagcagatccctgttattttactttatgttattttattttactttttgagacggagtctcgctctgttgctcaggctggagtgcagtggtgtgatcttggcttactgtaacctccacctcccgggttcaagcaattctcctgcctcagcctcccaagtagctgggattacaggtgtgtgccaccacgcccggctaatttttgtatttttagtagagacagggtttcaccatgttggccaggctggtctcaaactcctgacctcaggtgatccaccccacctcatcctctcaaagtgtgggattacaggcatgaaccactgcacctggtccaaatccctgttattaaagagcctcctaccctctgggccacttccagcctggaacaggggaggtgagggaacctggcctctgaacaggggaggtgagaactgccacaccctgaggatgaggggcacgtggctctccccgcattattagagacgtgattgctgagtaatgggtgacaggtgatccgttcccagataatgtgagtatgaaataccttaactctgtgagaaataagatgtggcattgggaaaaataaactatgacacttggccaagagtagcattgaagggtcccctgtttgagttaaattagcttggattccagaattccatcataacatcatgtaccctcttagcccctcttcttgcagcacacatgctggatattgtttttttttccctccgattctaacaactaacccccctcctgacacgcctgctgcagtcacttgacaagcagggcctgaccttcctctacagcctttcagagctccctgcggcctgagaactaacagcccagttgcactgcttgcctcagggcagggtgagatttctggagttcctggagcaggattcctgagctcactctggcagctcacccggggaggctctgtcttctccttggacctggaggaaggcaggacttggggcagctccaaactctgagcctggggtggccttcccctggtctttggcttatttacagagctggtgggcatgcgggccttgacacccaccacatctcatgatctgcccactcacctctcagggctcctcttgggtgcaactgcgtgtgctgaggagaatcacaggagccggagcaagaacacatgggcttggcaggagcctgctttgggaccgagagacgcggttttctgtatcttagaacttaggctctgagatccccggaaatctggaaaaagtccccgatgttgctggtcttttctggcagagctactcattgcctttagcctcctcttttgtccttatattaaaagacagcagacttaaaaaaaaaaaaaaagggccaggctcacacctgtaatcccagcactttgagaggctgaggctggaggatcgcctgagcccaggagtttgagaccaacctgggcaacacagggggaccccgtctctactaaaaatataaaaattagccaggcttggtggtgcacgcctatagtcccagctactctgtgggctgaggcagggcaggaggatcacttgaacccaggaggtcgaggctacagtgagctgtgattgcgccactgcgctccagtccgagcgacacagcgagaccctgtctcaaaaaaaaaaaaaaaaaaaaaaaaaggacggtgtgctgcatcagcagacagctgccctgtggcttccaagggcactaagttgacagctggttgggcccccagtggggctgtggggtgcatgtttgcctcttttcttccgggcagacagcggccagcaagatgagcattggccggcaaatagagcacgaccagccatggcccttgccattgaccctcacccaggcagtttcaccagctgggcctcagctctctgcttgggtggctcccatctgccactggccgtatgggctgtgtgcttcacctgcccgtgctccctctcctgccctgttccagtaaccaggggcagatggctgggtggggcgggatgtccaagccagctcccctctcgggggccgtgtcagggtatgagtcagaaaggaccagtcagtgagctgacacttgaatgaaatggagttctcggccgggcacggtggctcacgcctgtaatcccagcattttgggaggccgaggcgggcagatcacgaggtcaggagatcgagaccatcctggccaacatggtgaaaccccagctctactaaaaatacaaaaattagctgggcatggtggcgcatgcctgtaatcctagctactcgggaggctaaggcaggagaatcacttgaacccgggagttggaggttgtagtgagccgggctcgcgccactgcgcttcagcctggcgacagagagagactccgtctcaaaaaaaaaaaaaaagaaagaaatggagttctcagcaccacccttgcaggggcacctggtcctgcccccgaggagtgtgtagggtcaggggtgctggggagaagcagcctggggggcggcctctcggacccctgtctttgccccttcgcaccttgctctcattgccctgctctgtcatcttgtctctactctgtgctctgggcatttccctctgccccatggttcccaccccttgggctcccatcctgtctcctagcctctgcccccactctgcacccctcactttctctgctgtcttcctccattcttctccctttgtgttccttttacctctgcaagggacccttcagaggactttgggcacctctcagccctacaagtggggtatggggctaacggggctgctgggtacccctgtagcgtcctggcaggaaggctctgagggtaacctaagaggcgtgcagcctggctcctctctagggctcccagccacccatggaggcctcgaagtcaccattcctatgggacttaagcctggagcttgagcctggaggctgcttcaccgcgggggcccttaacacaaactcagccaaattgttgtgagctccggaggccccaggggtggtggagatggtgttccttccaagttgctcctaaagtacaaaaccccatgtcctgttaggttgtggcttctactcgaaatggggccacccctgtcaggtttccctgggaggaactggccagcctgcctccctcctgggctaacgcatgctctgggggtcggggaccccggggggtgcctgacagggtgtctcctgcttccttgtcctcccagatggagacctcacagacacggtcagtggtccccgctccacagcctccgacctgaccagcagcaaggcctccaccaggagccccacccagcgccagaaccccttcaacgaggagccggcagagactgtgtcctcctctgacaccacccccgtgcacaccacctctcaggagaaggaggaggcccaggccctggacccgccggatgcctgcacggagctcgaggtcatcaggtcagcagggaggggcccagaaaggagctgaggtcctggggtccaacctgtccactcccagcatcagctgttcatccagggcagaccgggacaccccctgagggcagttgcatgccttcctggaaacccttcccacctctaggaggttctttgagcaagaggaagtggaggcctgtcctagtcagctcggctgctggaacaaagcaccgcagacaggcggcttccacaacagacattctttctcacagctctggagcctacagtccgaggtcagggtgccggtgtggccagcctctgatgagggattcacagatgtccctcttctcgctgtgttgtggcggggagtggagagagagctctctagggtcccttttatgagggtgctgatcccattcctgaggatcccaccctcaggacctcatcaccccccaccccctgataccatcacattgggagttaggatttcaacacaggaatctggaggggacacacacattcactccattgtagggctcaagcccttggaagcaggtggcacaggcagcgaccgtggctggtgtctggggccatgtccaggctgccagggcgtttgctgggtctgcctaagatcagaaagcaccttcaggctgtacttcttcccaagggagttcttggaagttaagatacaatttctgagattcattgaaagaaaagtatctttgtcatatgggcaggacatggaaaggaaggacatggtgggtggccagcagggactgtcaaccagagcctccccggctccctgacctccccgaccccctcttaaaacttcacactgactaagaggagaagccctgtgtgcgtgtcagactgcccaggcttgctggcctgaggcgggggattgctccccagtgactggagccaggaggccaccccatgggctggttccagtccacagcagcatcatgctcagacctggggtcccttagctaagcccgctccagccaacctggaaccagagtgggacccggagcgtgagcccagaaagcgctgagtgctttctgggtgattcctccatgatgatgcctgagggaagtgaggtcagctcgggatccacatccgaaggggggctgagtggagggggcattgcctgaccagccatggcctgtttttctttcctagagtgcagctagctcagctgttccattaggaggaattcagtagacccactctggggttcctctggctgcagccatctgtgcccagcccatgctacccccaccccgcccctgccagcaaagggggtgcctcggggcctgagccactgttgtcctctgacccagtgcctccacccagcactgcctaggaccactgacgcactagctgtgccctcagaggctacatggccagcattgccaccgtgacccagcctggttttcctcagcactggactactcaggggttaacactctccccgtcgttactgtcccagggtcaccaagaagaagaaaattggcaagaagaaaaagagcagatcagatgaggaggcaagtccactccaccccgcctgcagccagaagaaatgtgccaagcagggggacggtgacagccgcaacggcagcccaagccttgggcgggactcgccagacactatgcttgcctccccccaggaggagggagaggggccgagcagcaccacggagagcagcgagcgctccgagccgggcctgctgatccctgagatgaaggacacctccatggagcgcttggggcagcccctgagcaaggttatcgaccagctcaacgggcagctggaccccagcacctggtgctcccgtgctgagcccccagaccagtcctttcggaccggctctcccggggatgccccggagaggccgccgctttgcgactttagtgaggggctttcagccccaatggacttctaccgctttaccgtcgagagtccaagcactgttacatcaggtggcggccaccatgaccctgcagggcttggccaaccgctgcatgttcctagtagccctgaggctgctggccaagaagaagagggaggaggaggagagggacagacgcctcggcccctagaggataccacgagggaggctcaggagctggaggcccagctgtccctggtcagggaggggcctgtgtctgagccagagcctgggacccaggaggttctctgccagctcaagcgagaccagcccagcccgtgtctgagtagcgctgaggattctggggtggatgagggacaggggagcccttcggagatggtccattcctcggagttcaggtaacaagactctgcagctggcatgggactctcccagcccttgaagctggggacactgtgcctctgacctccagataaattaagcactaggaagacctagcctgagtgagaaggggtgtgagcctccctccctaactttggctcctagtgggaggcggaggcactaccccctggctctggggtggggtgtggcctctctcaccgctgcctgcctgacatctcgccctcctgacttggccctcacagagtagacaacaatcacctgctcctgctcatgatccacgtgttccgagaaaacgaagagcagctgttcaaagtaagtcctaggaactcaggagtgagcaagagacggcaagggcaaggcgggatgggccaccgcccccgctggagcggcaggagccacctgcctgacccttgtctgcttcggcccccagatgatccggatgagcaccgggcacatggagggcaacctgcagctgctgtacgtgctgctcacagactgctatgtctacctgctccggaaaggtgcccgccgcccccgggcagacagcgggttgtagacgaggctgactctcagccccttttccccagtccccttgccctctgagtgcctcccggctgcctggcatgcagtgatggaaaggcaccccaaggaaggtgttgccagcagccctgagacgtgagcctggggctccctctgtgagcactccacgccattctcctactgcagggcaaggagaggccctctaagagagggggctgtgtctaagaaaatggggcagggggagggaaaagaggcctgtggggataataggccttggggtttcctctctcaggggccacagagaagccatacctggtggaagaggccgtttcttacaatgaacttgactatgtgtcggtgagtccaggccccgcagttgtgcgcctgctgtaggtacagggcttctcaagccacttacccatagaactgcagggcgaggcacggccccttactcccctcccggggttgggcaccaacttaactctcagagaggcttctgtacacgatgctgggggtaagaaccaagcttgaggttgcctcttcccgtgctagacttctgaccgtccctccctcactcatgccagcccctggcctctggggctttacttggtggtggcccggggtgtgcttcttcctccccagcaagcgctcagcctggccaagctgccttctccgccaggcagcagctaagccccaagtgcatgtcacggtgtggtttctggcaggttggccttgaccagcagacggtgaagctggtgtgcaccaaccgcaggaagcagtttctgctggacacggctgatgtggcgctggctgagtgagtggcaaccccgcccctctggaaggattggagagttcgcagccgcccataggtgtgggtggcctgggggtcaggggtggaggtggaaagtgggagatccaggaggggaaaccagatgtattccctctggaacctgcatctgctcagagaggcaggcaagtagacgacaatcataggactcatgtggtcagcccaggtgacctcagcccctggcgactcttgggggtgctagcatgagttgttggacaggaaggcaggcagagagccatgctgctgggccaggcgtgcccttgaacgcctgcatccttgtcgtggctcaaggtcccacccgttgacgtcctgcccaccctctttgtctgtcttccctcactgtcaaaatccaaggccccttggccattgagaacgatcaggcctgttccagttgtcatttgatgaccttggacctgcgtcattgccgcacctgccgccctggtcactgggtctagccaggtctctcccccaagtttctgtgacccctccaggccagcagcgctcaagactaagccctgtccagttgaggccctgttcccaggcctctaaccacaaacctcactccctatgcaggttctttttggcttctttgaagtcagccatgatcaaaggctgtcgagaacctccctaccccagcatcctgacggatgccaccatggagaagctggcactggccaaatttgtggcccaagaatcgaagtgtgaggtaagaacctggggaggaagctgagtgcagcccctgagatggcagagcagcagccgccttggcgtgagcgttaagggatgcacgtggatgtctttgccatttcacaatcgcctacctgggcggggcggggcggggcggggcggggcggggctttcccaccctggaagggaggaaagtcatgtccaccttcctacctggggtgtgtcctaaggttaagacaccctcgctcggcagggcacagtggctcacgcctgtaatcccagcactttgggaggccaaggcaggcggatcacctgaggtcaggagttcgagacccgcctcgccaacatggcaaaaccccgtctctactaaaaatacaaaaattcagccaggcgtggtgatgggcgcctgtaatcccagctacttgggaggctgaggcaggagaattgcttgaacctggaagatggaggttgcagtgagtggagatcacaccactgcagtccagcctgggcgacagagcgagactccatctcaaaaagaaaaaaaaagaaccagtccgggctcagccacctgcctggcccaggccttacttgctttgtcccccgtgcccgcccccgcatcaggcatctgctgtcaccgtgcgcttctacggccttgtgcactgggaggaccccacagacgagtccctgggccccacgccctgccactgctcaccccccgagggcaccatcaccaaagaaggcatgctgcactacaaggcgggcacctcctacctgggcaaggaacactggaagacgtgcttcgtggtgctcaggtgggagccctggcagctctaggcctggggcttgggccctggggtggctgggctgtcaggtccccagcggggatctctccgcagcaggtcactgagggagcagcctgaggagaggacgcctcccttccctaccagagcttggagttgacttagctcaggctgttagagcttctctgtagagccagtcatctttggggccccaggaatccctgagtgcctcaggggaggatgcaggcttggtcccccgatgaaccttgagctgcgccccaggtctgctgaggtggccacattccctgctgggcccccaggcccttcttcaccctgccttccgtagatgacagcccctggtgtcctttgcctcaggttcatggccgcagcatgtgcgtgggaggggaaccctgggacctgggctccgcctggccccagttcctgggacaggcctcactcgccctgtgttgtgcccctgcagcaacgggatcctctaccagtacccggaccgcaccgacgtcatccctctgctctcggtgaacatggggtaagtgtcccgggagaagcgggtgtatcctggggcccagagctgccgtttccctggtttgagatggctgcccctgttggcagttcagcctcgccctcaaccccaccccatccagcggccctgacaggtggcctggggcttccacgctctgagggctgcaaggagcccacaggaggggaggagggaggcagcaaggagctcctggcttagaacaggtccagtctgatgggggaggcaggcccttccccagaagctcccggcctgatgggagatggacgttcgggtatttgggaggaacagcaggccctcaagaggaagcatgcgtgaatgaatgcggccgattctcagagggccagtgggacagctgattcccaacccctcctggccatgcttgggtatctagaggatcttgggcatcctggaggtgaaaggcatcgcacagcaaggcggtgggtggggctcccagacctctcctgggagctggaggggcctggagaaccctctggtatcctccagcccccaagacggtggggcagaccctgtgccgcacaccccgcaccaaccctgggggctgtcgccccgtgctgcccttgcctcctcgctcccgtttcaccctcctcctctggcccaggggggagcagtgcggtggctgccggagagccaacaccacggatcggccccacgccttccaggtcattctctccgaccggccctgcctggagctaagtgccgagagcgaggccgagatggccgagtggatgcagcatctctgccaggctgtgtccaaaggggtgagcttcgcctgcccctaccgctcacctggcttgcctgacccacccagacccccagggtcccatccctaaacccatagtcacagagcaacctgagggccaagacggacctccagggggcagcccaggaatggaccctggagctcagaggcatcacccccatccccgcctctgctcccgatccctggagggagatccctggagggagagcagaagggctggctggtcccctggagtgtggacttctggtgcagaccagccctggaggccccagcctgcctctcccctgccccgctgccaggtcatcccccagggcgtagctcccagcccctgcataccctgctgcctggtcctcacggatgaccgcctctttacgtgccatgaggattgccagaccagcttcttccgctctttgggcacagccaagctgggcgacatcagcgccgtctccaccgagccgggcaaggagtactgcgtcttggtgagctttgagtgggggcggggctgcaaggcctgcagaaggaaagctctggctgctcacccgggggcctggctctccctaggagttctcccaggacagccagcagctcctcccgccctgggtcatctacctgagctgcacttctgaactggaccgattgctgtctgcactgaactctgggtggaaaaccatctatcaggtacccagctgcccaggaaacccattagccagggaccctgtggagtgggagccactccccggggagaggaacccctgctgctcccaggacttggccctgcctccagggtcctgggcacagccatgtaccagggcgctcctgcctcagccccgggggtgagtgcctgctgctcttaaaacaaacccagaagagtcctcactgtccttgccgtctcttgctgcgcacaagcctgccaggctgggagcccgaggccctcaagccactcagcattgctgcctcaagggcctgggagggaaggggtgggccctgggaggtgggtgtgggactccagccccggtggttctgcctctggtttggactgggccttgggtgattgagggtggcctggcaggagagagctgtctgggggcagaggccaaggtgggcatgttggtgccagccccagactgagcagacacacctgacaggcacaaaaacttagaatcaaaaggacaaaaccctgactcccagtgagtctgaggccaaagctgaaaacagaacccaagaagcttaattcctgacctcagttccaatcaaacagcacgaattgtggtggacctccagctgtgctcagatggggggacacaatattggcagtaccctcttccttgccctccaggctgagtgccagtgtgggagcgtgctcatgagagccctgcacaagcgggttttgagcacatgctacgctctagccccgtggaagcctggactagttagaggcagagaacagctcaggacagacacctccctgcagagccaaacagagtgcagcgcctgcctcgctgggccatcctgagagctggggccttcccaggaaagagggagctcggggggcaccaccccatcctcagctcaagcccctggaagagcgggagaaactagcagcgtggaagatgttcccagggagagatggggagggcctgacaggggctccgtggccaaggcagaggcaggcctggtgcccacaagccctgaagactcctgtggccctcagtggccctcatctgttctctgcacgccccaacacaggtggacctcccccacacggcgatccaggaagcctccaacaagaagaaattcgaggatgccttgagcctcatccacagcgcctggcagcggagcgacagtctctgccgcggccgagcctcccgagacccctggtgctgaggcagagctggttggcgtccctggtgggcaggaaaggaaggcacgccagccggcaggcacactgtcacggctgttgtcatgctgtcgggagcctacagtccacccctgccctgggcggcagaaccaccgagtgtggcttaagacagggtccctccactccagggatccagatcaggtgcccggcacccctgggcatcctgcccgacaggtagcgaatggaggtcgctgggggcagagggtccgagccctgtgggctctgcggatgcacgccctcctcccgggcctccgcctcagtctgcagaatttctgccgagtggcaccgagaacaccatccatctaaggacgaacaaaagaaccaggagggcgggacccccctcttcctctcctgggttgggggctggggccctgagtgcccagccatccttgttcgtgtttgaacactctcctggccacgtggggaagcgggaacacggggtgtctgcgcatgtttcctcctcctagctccatcactgcgcacacagctgcctgcctcgccagatgcaggggggcgggcagccctccctggctgccaggaggctctgcatgcccacagtcctgccctgcctgtcccctcaacccggcagtgcctgtagcaccgaggagcaaagggggtggatggggggcttggagaagggcggagcccaccagcctggcatccatgttgacatcttctgactgtcccctgcttggctggagccaggcccttccctagagtttcgtcaagagcctcctggggaaggggtcaggtggtttgggttttgttttttaaaataaaatagacatgttatattgccaa

SEQ ID NO: 386 - DNA, 5288 bp, Homo sapiens
atggagtctcgctctgtcgcccaggctggagtgcagtggcatgatctcggctcactgcaacctccaactccctggttcaagcaattctcctgcctcagcctcccgagtagctgggattacaggcatggtggggcccggctaatttttgtattttttttagtacagacagagttttaccatgttggccaggctggtctcaaactcctgacctcaggtgatccgcctgctttggcctcccaaggtgctgggattacaggcgtaagccactgcacccagctaccaaaacaattttgaaaaagaatgttgagggggctggggtggacttgttctgcccataccaaaatgctgaataaagtgaaaattttaaatggaggaccagcacaggaatatataataggccaacaagaagtagttttaaaaggggcatattacatcacagatcagccaggcatagtggcatgcatttgtagttccagctacccagcaggctgaggtgagaggattaggaagagctggaccattaattaacattaataaatacgagggctgggtgccgtggctcatgcctgtaatcccaacactttgggaggccaaggcaagcagatcacctgaggtctggagtttgagaccagcctggccaacacggtgaaactggatccttacctcatgccatatataaagctggatccttacctcatgacatatataaagatctaaacataagggaacctggccgggcatgacggctcacccctgtaatcctagcattttgggaggccaaggcaggaggatcccttgagcccaggagttcgagagcagcctgggcaacatagggagaccctgtctctatcaaaaataaaaataaaataaaataaataaaaacataaggggaccaaaaaccagcagtgaaaaaacaaaaaagatctaaacctaaaaaccaaaatcaaattgtcctaaaactataaaagaaaaaaggcacttttgtggccaaccgtggtggctcatgcctgtaatccccacactttgggaggctgaggtgggcagatctcttgagctcaggagttcgagaccagcctggccaacatggcaaagccccatctctactaaaaaatacaaaaattagccaggtgtggtcgaaggtgcctgtgatcccagctacttgggaggctgacgcaggagaatcacctgaacctgggagacacaggctacagtgagccgagactgtgccagtgcactccagcctgggcaacagagcgaggctccatctcaaaaaaaaaaaagaaaaaagaaaaaaggcacttctgtaatcttacattgggaaaaatgggaaactataaaggaaaagactggtagatttgactgcatcaaaattaaaaatttctcaatagggcaaaaaaatgacaagtgaagtttaaaggtcaattgataacgggggggaaaataatatataacaacacattaggttaaatccttaaagagctgtaacatggctgggcgcggtggctcacgcctgtaatcccagcactttgggaggctgaggcgggtggatcatctgaggttgggagttcaagaccagcctgaccaacatggagaaaccccatctctactaaaagtacaaaattagccgggcacggtggcgcgtgcctgtaatcccagctactcaggaggctgaggcaggagaatcgcttaaacctgggaggcagaggttgcagtgagccgagatcacgccactgcactctagcctgggcaacaagagcaagattcagtctcaaaaaaaaaaaaaaaaaaaaagagctgcaacaaataacaaaaacacaagcagccagtggaagattgggcaaaggctgtgaatacttagttcctagaagaagagaaacacgtggctaatatggatgttccactgcgcttttaatcagagaagtacaatttaaaacaggtactatttttcaccaaatggactggaaaaaattagactaattatatgcagtgttggccagcatggtcggagtgtaaatcagtcagacattctagacggccaggtggcaggacccaggcagattgtgaatgtgtttgtctgttggctcagcagttccccttgcaggcactcaccatacagaagcatccacacaggactgcacaatggtcactgcaatattatgtgctatgtccaggaactggatatgatatccatatttaacaatggttgaagtatggtacatcataatgatatggaaatatacatggatataccttaaaggcaaaacaagtttcagaatgaatatagcatgatcttattttcctttttttttttttttttgagacaagttcttgctccaggctggagtgcagtggtgccattacagctcactgcaaccttgaactcctgggctcaagggatacctccccctgaccctgcctcagcctcccaagtaggtgagactataggtgcatgccaccatgcctagctagcttatttttatttttatttttcgcccctgctggagtgcagtggtgcaatcttggctcactgcaacctccacctcctagggtcaagcgattctcctgcctcagcctcccaagtagctgggattacaggaatgtgccaccacacccagctaatttttgtatttttagtagagacggggtttcaccatgttagccaggctggtctgaaactcctgacctcaactgatttgcctgccttggcctcccaaagtgctgggattataggtgtgagccaccacgcctggctaatttttaattttttgtttgtttgtttgtttttgtagacacagcgttttgctatgtggctgaggctggtctcaaactcctggcctcaaacgatcctcctgcctcgggcctcccaaagtgttgagattacaggcatgagccaccactcgtggcattcctttttttcttatttctttctttcttttttttctttttttcttaggtctgtgtatacaggaaaagagttggggggatacgtgcacaccaagctgttggcaatagtaaatgggagcaagggggcctttattctttatacacacctctgtgttgcttccatttttacaatgaacaaatgttttcagaataatttttctttaaaggtatcttagctgagaaaagagtctgagttccagccctgggtcctgtcacttaactaaaaaccatattgagggacttaacctcgtctctgtaaatacacaaatatacacattcttttccatgtgggaattataattcaagagaatgaataatattctgttttttgtttgtttgtttgttttttgttttttgtttttgagaaggagtcttgctctgttgcccaggctggagtgcagtggcgtgatctcagctcactgcaagctccgcctcccgggttcctgccattctcctgcctcagcctcccgaatagctgggactacaggcgcctgccactacgcccggctaattttttgcattttgcttagtagagacggggtttcactatgttagccaggatggtcttgatctcctgacctcgtgatccgcccacctcggcctcccaaagcggtgggattacaggcgtgagccactgcagcccagccctgtttttttttttttttttggagacagagtctcactctgctgcccaggctggagtgcagtggcacaatctcagctcactgcaacctctgcttcctgagttcaagcaattctccttcctcagcctcctgagtagctgggattacaggtgcctgtcaccgcacccagctagttgttgtattttagtagagaacgaggtttcaccatcttggccaggctggtcttgaactcctgacctcgtgatccacccgccttggcttcccgaagtgctgggattacaggtgtgagccaccacacccggccctgttttggttttttaattagaacattgcactagatctctaaggatgcttccagctgtaacatctgtctataggctctctgatctcagatttactcagattttgaaattaaaaaaaaaaaaaaaaaaaaagctctaccccagtgtggtcgtacttaatactgaagtgtgcagtaatgtttccagctgttgctgagagggattatgcagtttttgcaggcttattcctctttctttcagctctagaaatctttccttctggtgctctgatttgcctgcctctgggaggaagggaagggaagaccctgcaggactgaggtttgtcctggctgacaggcctgccaggcttgttccgggctgcagagaagagaggctatttttgttgtgggagctgaattgttggtctctctccaggagcacatgcttgttggtgtggttgatgtatcttgcctgctgtggccatctctaccactgcttccagaaaacacttgagaatacgtttgtcccaagaggttaaacctgagatcaggatcaggcatctgtgctcttgtcttgtgttccactcccttctggccattggaagggcagtagcagaacaggatatggctaacatgaacttggagagacttttctcctagagctgtgcttgaaaggggccctctctctgtaactgcggttgcagtgaactcagtccaatatctgggctttcttgtccttcagtaggctgatggagctgcccttgccctcaccagcctggtggggtttgcacagtgctgcagttcatctcacctactgtccaaatctccttttatcagcccagtccaggaacagtggtgtccttcttggtgtagggcttaacgtgagccttgcatgcacctagatccatatccagcattgcaggcaattctagtattccatgtcaagaaggctggcaagaaggctggtggggcaggtgccccagtccatcggcccttagtatatgcagagggtagctccaagtggggccactgtgatatgaaggaggattgtttgaattcaggagattgaggctgcagcgagccgtgatcacaccactgcactccagcctgcatgacagagtgagaccctgtctcaaaacaaacaggccgggcacagtggctcacgcctgtaatcgcagcactttgggaggccaaagtgggtggatcacctgaggtcaggagcttgagaccagcctggccaacatggcgaaacctcgtctctactaaagataaaaaattagctgggcatggtggtgggcacctgtaatcccagctactcgggaggctgaggcaggagaatcacttgaacccaggaggcggaggctgcagtgagccgagatcatgccactgccctccagcctgggcgacagaacaagactttg

SEQ ID NO: 387 - DNA, 892 bp, Homo sapiens
cccccctcctgacacgcctgctgcagtcacttgacaagcagggcctgaccttcctctacagcctttcagagctccctgcggcctgagaactaacagcccagttgcactgcttgcctcagggcagggtgagatttctggagttcctggagcaggattcctgagctcactctggcagctcacccggggaggctctgtcttctccttggacctggaggaaggcaggacttggggcagctccaaactctgagcctggggtggccttcccctggtctttggcttatttacagagctggtgggcatgcgggccttgacacccaccacatctcatgatctgcccactcacctctcagggctcctcttgggtgcaactgcgtgtgctgaggagaatcacaggagccggagcaagaacacatgggcttggcaggagcctgctttgggaccgagagacgcggttttctgtatcttagaacttaggctctgagatccccggaaatctggaaaaagtccccgatgttgctggtcttttctggcagagctactcattgcctttagcctcctcttttgtccttatattaaaagacagcagacttaaaaaaaaaaaaaaagggccaggctcacacctgtaatcccagcactttgagaggctgaggctggaggatcgcctgagcccaggagtttgagaccaacctgggcaacacagggggaccccgtctctactaaaaatataaaaattagccaggcttggtggtgcacgcctatagtcccagctactctgtgggctgaggcagggcaggaggatcacttgaacccaggaggtcgaggctacagtgagctgtgattgcgccactgcgctccagtccgagcgacacagcgagaccctgtctcaaaaaaa

SEQ ID NO: 388 - DNA, 470 bp, Homo sapiens
ttaatgtttaactttttattaagaaactaaggcaaaacaacagaattccaaaaaataaagatacagaattctaatttaaattctaaacaaatataaaaatcagagtttaccagtatttttgagtagaggggagtggctaaatgcattcacagtaattatttcttccttaccagcctcaagtttgcaaccctttccttcctgcttcactgggactagaacagaatttctcattcatcttttgctactataatttttgcttctatagtctaaaacttcagaggagcttttgtctttctccgcagttctttctctgttccttcagcaaatatgtgagcacctgcctattgggcttacatgttgtggcacaaagatgagtccgttagagatcctgtcccagtttaggggcgatatgacaccaataaataatcaataaataattttaaacaaggtataaataaatacagcatgag

SEQ ID NO: 389 - DNA, 811 bp, Homo sapiens
ttaatgtttaactttttattaagaaactaaggcaaaacaacagaattccaaaaaataaagatacagaattctaatttaaattctaaacaaatataaaaatcagagtttaccagtatttttgagtagaggggagtggctaaatgcattcacagtaattatttcttccttaccagcctcaagtttgcaaccctttccttcctgcttcactgggactagaacagaatttctcattcatcttttgctactataatttttgcttctatagtctaaaacttcagaggagcttttgtctttctccgcagttctttctctgttccttcagcaaatatgtgagcacctgcctattgggcttacatgttgtggcacaaagatgagtccgttagagatcctgtcccagtttaggggcgatatgacaccaataaataatcaataaataattttaaacaaggtataaataaatacagcatgagtcaactatagatatataaaactagggaaatttcaaggagagattacattcagctagagaaactgaggaatgtttttgaggacagcatttgggctgggtgtgggctgttcctaataaaggcttccaagtggtcctgattatctaccacagtcccaatttgtggaactgtggtggtctcaatttctggaaagtaatcttttcaatgctaacctttaaaactccttaaatttctggcctggcacggtggctcgcgcctgtaaccccagcactttgggaggcgaggtgggtggtgttggccaggagttcaagaccagcctggccaacatggcataaaccccctct

SEQ ID NO: 390 - DNA, 981 bp, Homo sapiens
ttccttgtatgaaaagatttaatgaattatgagccattgatcattacaaactttaagccttaatatttcttctttcctatgtaaaaccaggtaattaaaacagcctgtctcagtatgacagaagaccatagtagggataatagtaacgtctgcttccacatctgcatgcttcgttaaccaaccaaagaaagtgctccaggtttcccaagtcaacaaagtatactcagttacactttccctgatcatactatgaattgaaacagaacactcctttgacttttaatagcacttttcatccacggcacaagcactttcccattattttctcctttaccctcaatatccttgtgaggtagtgaagggagggagcaaggatttttttttttctattttgcagatgagaaaactcaaggtgaattttacaacagtggttctcaaccttggcagcatattgaaatgaccagaaagtttttaaaaatccttatgaccagctcatattccagaccaacatcagaatcttggcatacggaacccaagcatcgatgtgtcttccaacattccaaagtgactacaaagtgtatacagccaacactgagaaccactggtttgaatgatttacactcaatcttcaggcgcaactgtcttctaccgaaatgctctcctcagcacacaatgacaaagatattccatctccttgagcactgcagcagtttaagattttgtagagctactactgggatttagtgacaaatttacgtaaatgaaggacctcatgacccagatgctcatgctgctcactttcaattgcatatgatttgcgattgggacattcgggaatttaaatctttgagataagaatggcttgattgttaactattgaggcaattatttcattctaggatcaatacgcaataaccatgtgtttcagatttcactcagcacctcaaaacggatgcactgaaatgttttctacaagacaaa

SEQ ID NO: 391 - DNA, 579 bp, Homo sapiens
  SITE (25): n equals a,t,g, or c
  SITE (46): n equals a,t,g, or c
  SITE (50): n equals a,t,g, or c
  SITE (160): n equals a,t,g, or c
ggaagccgaaacggcggatcgcttnagccagccaggattacatggngaanccactctctaccacaaatacaaaaattagctgggcgcggtggcacacgactgtgggttccagttactcggcaggcggaggtgaaaggatcctttgagcttctgaaggtgnaggttccagtgagctgtgattgcgccactgcactccagcctgggcgacagagtgagaccctgtcagaaaacaaaacaaaacaaaagaattctgtaagaacttctaacaggtacattcctgtaagcattacccaccactggactaggcactgggtagcctgtaaaatacagtaagagccgtctctgcacccagaaaatttaccatcattttgtgctggaaagacatgccctagaaaacaataaacagcacgactgtacatgattccatgccaaatgactgctaggaattattttattaatccattcaacaaatacttattgagtaaccactattagccagccaccgttttccgtgtgaggacataaaaatgagtgagacaaggtctctgccatcaaaaaacgaacagatcagtgaggaaa

SEQ ID NO: 392 - DNA, 442 bp, Homo sapiens
atcccttgagcctctggaggtggaggttgcagtgagctgtgattgcgccactgcactccagcctgggcgacagagtgagaccctgtcagaaaacaaaacaaaacaaaagaattctgtaagaacttctaacaggtacattcctgtaagcattacccaccactggactaggcactgggtagcctgtaaaatacagtaagagccgtctctgcacccagaaaatttaccatcattttgtgctggaaagacatgccctagaaaacaataaacagcacgactgtacatgattccatgccaaatgactgctaggaattattttattaatccattcaacaaatacttattgagtaaccactattagccagccaccgttttccgtgtgaggacataaaaatgagtgagacaaggtctctgccatcaaaaaacgaacagatcagtgaggaaa

SEQ ID NO: 393 - DNA, 511 bp, Homo sapiens
tttccttagacaaggtcttgctctgtcacccagactagagtgcaatggcactatcatggctcattgcagcctctaacttctgggctcaggtgatcctcccatctcagcctctggagtagctgggaccacaggcgtgtaccaccacacctggctaagtctttttttaattttctgtggggataggggtctcaatatgttgcccagtctggtctcaaactcctgggctcaagccatcctcctgccttggcctctcaaagtactgggattatgggtgtgagccactgctcctggccaggttctctatcttgttcttcactgtatccctaggctcaaggcccaccacaatattattaggcaatcaataaatatttgtaaaatatgtgaaaacaacatcaccaccacagattctggcttagattatttggtatgtagatgcggattccaaacaccaaagtaaggacatatttctgtttccccagttctgcatgtgtatgtgcgcagacgtacacag

SEQ ID NO: 394 - DNA, 298 bp, Homo sapiens
agagcaggccgggcgcggtggctcacgcctgtaatcccagcactttgggaggccgagatgggcggatcacgaggtcaggagatcgagaccatcctggctaacacggtgaaaccccatctctactaaaaaatacaaaaaaattaaatgggcatggtggcaggcgcctgtagccccagctactcgggaggctgaggcgggagaatggcatgaacctgggaggcagagcttgcagtgagccgagatggcgccactgcactccagcctgggccccagagcgagactccgtctcaaaaaaaaa

SEQ ID NO: 395 - DNA, 4861 bp, Homo sapiens
gggccacgccgccaggccctggctgggccttctcctgtcgcctgtgcggccgcggcctgcaggagcgcggcgaggcactggccgcctacctggacggccgtgagccagtcctgcgcttccggccgcgcgaggaggaggcgctgctgggcgagatcgtgcgcgccgcagccgccggctcgggagacctgccgcccctcgggcccgccacgctgctggcgctgtgcgtgcagcattccgcccgtgagctggagctgggccacctgccacgactgctgggccgcctggcccggctcatcaaggaggccgtctgggtgagcgccccccaatcgccgtccagccccaccagcgccccaagtcccttctccagcctcccttccctaccttcaacccttttcatagctgggctggatactactgttcccatgacgcctcgggaaggatttggggttttgggttttgtttgtttgtttgtttgtttgcttttgtttttgagacggagtctcgctctgttacccaggctggagtgcagtggcggtcttggttcactgcaacctctacctccggggttcaaatgattcttctgcctcagcctcccgagtagctgggattgcaggcgcctgccagcacgcccggctaattttttgtatttttagtaagacggggtttcaccatattggccaggcttgtctggaactcctgacctcgtggttcgcccgcctcggcctcccaaagtgctgggattacaggtgtgagccaccacacccggtgttttggggttattaagcaaggggcccccccatagaatgctgggagatgtagatccactgcacttagagggaagcccaaactcaccttaggagagctcacctaagcacgaactcaccttaggaagaaaccattatgggagatggtgggggagagatcccactggatgagaagttgacagagatcagtgtgagaattcaccgcagcccattgggcttggagcttggatagcagtgagcgagttcattcttggaggcgaggaagcacaaatccactggacctacagatggaagttccagaaagaaaccattcagagtgggggaaacgttccatcctattgagctagggcctaaccagagaggtttaaggagtttcttgggggtaaaaattggagaagaggacctgaaggagctagatcactcataatcatagggtgtgtatgttttaaaaagtaaggagagaccattctaaagcttgtgggattagaatttgtctcaagagccaggcgtggtggctcatgcctgtaatcccagcactttgggaggccgaggcgggcagatcacctgaagtcgggagatcgagaccatcctggctaacatggtgaaaccccgtctctactaaaaatgcaaaaaattagccgggcatggtagcacatgcctgtaatcccagctacttgggaggctgaggcaggagaatcacttgaacctgggaggcagaggttgcagtgagccaaaattgagccattgcaccccagcctgggcaacaacagggtaactccatctcaaaaaaaaaaaaaaaaaaaaagaatccgtatgaagagtgaaggccggttgcagtggctcatgcctgtaatcctagttctttgggaggccaaggtgggaggatcatttgagctcaggagttggagaccaccggtggcaacatagtaagaccccatctctaagaaaagtaggaccagtctctatgagagttgtgcttctataaaaaccagggtattaactcttaagcccctcagtggatccccctcaccttgattctgatcttactgttccacaggaaaagattaaggaaattggagaccgtcagccagaaaagtaagagaaattctgagcagagtggtctggagggatgcaggggttgggttttgcgtctagttctgtgttcaccccatgcatgccccagtgcaagtttctgcttctccttgcgctcaacttttccagctgcgcaatgggagttggtcttgctctcccacttagacttagatcttggggtttgtaaactatgatgagggttgggcagggatcacaaattccttcctctttttcaagccaccctgagggggtccccgaggtgcccctgactcctgaagctgtgtctgtggagctgcggccactcatgctgtggatggccaacaccacggagctgcttagctttgtgcaggagaaggtgctggaaatggagaaggaggctgaccaagagggtgagctctgactcaggctcaggcttgtccaagtctcccatcatgccctgcacctggggacctgggctcctggctgccgacttctggttctccctcttaaccccaagcctgtcctcagacccacagctctgcaatgacttggaattatgtgatgaggccatggccctcctggatgaggtcatcatgtgtaccttccagcagtctgtctactacctcaccaaggttggcccttgcctcttacttcctgtttgacatagcatcacttcctgtttcacgtaatatcacttcctgtttgtggtaacatcacttcttgtttgaactacactgtgtggctctgatgtcactatttgactcaagattttctgcttttctctgacatgacatcccatctcacccaaggactttgctgttctgacaccacttgttagagcttacatcacttcctgcctttctggcttcttttcctttgtaatcatcacctgggcaaacgcggtggctcacatctgtaatcccggcactttgggaggtcaaggcgggtggatcacttgaggtcaggagtttgagagcagcctggccaacatggtgaaaccccatctctactaaaaatacaaaattagccaggcatggtggcctgcgcctataatcccagctattggagaggctgaggcacaagaatcacttgaacctgggaggcggatgttgcagtgaaccaagattacttcatgccactgcattccaacccgggagatggagcgagactctgtctcaaaagagtaatataacgccggatgcagtggctcacgcctgtaatcccagcactttgggaggccaaggtgggcagaccgcgaggtcaggagtttgagaccagactgaccaacatggtaaaaccccgtctctactaaaaatacaaaaattagctgggtatggtagcgcgtgcctgcaatcccagctactcaggaggctgagggaggagaatcgcttgaacccgggaggcggaggttgcagtgagctgaaatcgcaccattgcactccagggcgacagagacagactccatctcaaaaaagtaaaataaaattaaacgaaataaaaaaaaaagtaatcatcaccacttttgacaggctgacctcactacttggtaacatcaccattaccaccttctgaatctcccactttctaagtctactcttcagtcactgttaagtttcatatataatagatagataaatgattgatagatagctagagatcaaatagtgccaggaactgtgatttaaactgaagatcctctttcatcaggccccacttccttcgcttgctgacctcacttcctacagctctgaattcacttccctttcagaacgacagatctttttctctgagtgcccttcctggaagggcctgctttctgccccagtttcccccccattacccttgaccttaacaccacttcttggcattctcagggtttctggcttatggtgggcttgatgccctatgtgcaagaatgagagaggatcttttgggacagctaactatcagtctctaagttcctctagcagcctggattgtgaagccctttcctccttcacttcctgtacattcctgccaagtgtgcgtttatttcttctgtttctgacctcatttcctgtccttggcctgatctcattttccactggcaaactgccatcccactcccacttcctgactctccattctttttctttcctttgggaattcaggatgaataattctttgactgaaagggaactctttgtccagtatcctttgtcctccttgagctgtctctgctgagaactacaagtcccacaatgcacaagaggtgatcttaaaatactcgagaaacttgtatacccttctatcaagtagggatttgctcacggagaccctttgggtgttgactgtagaatggactacaactcccagaagactttggtggagctccccactatcttcatgctctattaccctgaagcttcctgggagttgtagtccaatcacttgtttccacttctctattttctcagactctctattcaacgctgcctgctctcctggatagtaaccctttcacagctggtgcagagctgccggggcctggcgcggagctgggggccatgcctccaggattgagacctaccctgggcgtgttccaggcagccttggagctgaccagccagtgcgagctgcaccctgacctcgtgtctcagacttttggctacttgttcttcttctccaacgcatcccttctcaactcgctgatggaacgaggtgaaggttggctgggagctgtcagggaggcaaagacaggagccactgagactcaggtcatattagacacaccacgggctcaagcctcacctttgggtaccctggagaacaagctccagatcccaggctgaaggataggaagagtctgggaggcaggagcacagagtccagccaaccaactgcctctcatacctttaacacccacaggtcaaggccggcctttctatcaatggtcccgagctgttcaaatccgaaccaacctggacctcgtcttggactggctacagggagctgggctgggcgacattgccactgagttcttccgg

SEQ ID NO: 396 - DNA, 4808 bp, Homo sapiens
gcggccgcggcctgcaggagcgcggcgaggcactggccgcctacctggacggccgtgagccagtcctgcgcttccggccgcgcgaggaggaggcgctgctgggcgagatcgtgcgcgccgcagccgccggctcgggagacctgccgcccctcggcccgccacgctgctggcgctgtgctgcagcattccgcccgtgagctggagctgggccacctgccacgactgctgggccgcctggcggctcatcaaggaggccgtctgggtgagcgccccccaatcgccgtccagccccaccagcgccccaagtcccttctccagcctcccttccctaccttcaacccttttcatagctgggctggatactactgttcccatgacgcctcgggaaggatttggggttttgggttttgtttgtttgtttgtttgcttttgtttttgagacggagtctcgctctgttacccaggctggagtgcagtggcggtcttggttcactgcaacctctacctccggggttcaaatgattcttctgcctcagcctcccgagtagctgggattgcaggcgcctgccagcacgcccggctaattttttgtatttttagtaagacggggtttcaccatattggccaggcttgtctggaactcctgacctcgtggttcgcccgcctcggcctcccaaagtgctgggattacaggtgtgagccaccacacccggtgttttggggttattaagcaaggggcccccccatagaatgctgggagatgtagatccactgcacttagagggaagcccaaactcaccttaggagagctcacctaagcacgaactcaccttaggaagaaaccattatgggagatggtgggggagagatcccactggatgagaagttgacagagatcagtgtgagaattcaccgcagcccattgggcttggagcttggatagcagtgagcgagttcattcttggaggcgaggaagcacaaatccactggacctacagatggaagttccagaaagaaaccattcagagtgggggaaacgttccatcctattgagctagggcctaaccagagaggtttaaggagtttcttgggggtaaaaattggagaagaggacctgaaggagctagatcactcataatcatagggtgtgtatgttttaaaaagtaaggagagaccattctaaagcttgtgggattagaatttgtctcaagagccaggcgtggtggctcatgcctgtaatcccagcactttgggaggccgaggcgggcagatcacctgaagtcgggagatcgagaccatcctggctaacatggtgaaaccccgtctctactaaaaatgcaaaaaattagccgggcatggtagcacatgcctgtaatcccagctacttgggaggctgaggcaggagaatcacttgaacctgggaggcagaggttgcagtgagccaaaattgagccattgcaccccagcctgggcaacaacagggtaactccatctcaaaacaaaacaaaaaaaaaaagaatccgtatgaagagtgaaggccggttgcagtggctcatgcctgtaatcctagttctttgggaggccaaggtgggaggatcatttgagctcaggagttggagaccaccggtggcaacatagtaagaccccatctctaagaaaagtaggaccagtctctatgagagttgtgcttctataaaaaccagggtattaactcttaagcccctcagtggatccccctcaccttgattctgatcttactgttccacaggaaaagattaaggaaattggagaccgtcagccagaaaagtaagagaaattctgagcagagtggtctggagggatgcaggggttgggttttgcgtctagttctgtgttcaccccatgcatgccccagtgcaagtttctgcttctccttgcgctcaacttttccagctgcgcaatgggagttggtcttgctctcccacttagacttagatcttggggtttgtaaactatgatgagggttgggcagggatcacaaattccttcctctttttcaagccaccctgagggggtccccgaggtgcccctgactcccgaagctgtgtctgtggagctgcggccactcatgctgtggatggccaacaccacggagctgcttagctttgtgcaggagaaggtgctggaaatggagaaggaggctgaccaagagggtgagctctgactcaggctcaggcttgtccaagtctcccatcatgccctgcacctggggacctgggctcctggctgccgacttctggttctccctcttaaccccaagcctgtcctcagacccacagctctgcaatgacttggaattatgtgatgaggccatggccctcctggatgaggtcatcatgtgtaccttccagcagtctgtctactacctcaccaaggttggcccttgcctcttacttcctgtttgacatagcatcacttcctgtttcacgtaatatcacttcctgtttgtggtaacatcacttcttgtttgaactacactgtgtggctctgatgtcactatttgactcaagattttctgcttttctctgacatgacatcccatctcacccaaggactttgctgttctgacaccacttgttagagcttacatcacttcctgcctttctggcttcttttcctttgtaatcatcacctgggcaaacgcggtggctcacatctgtaatcccggcactttgggaggtcaaggcgggtggatcacttgaggtcaggagtttgagagcagcctggccaacatggtgaaaccccatctctactaaaaatacaaaattagccaggcatggtggcctgcgcctataatcccagctattggagaggctgaggcacaagaatcacttgaacctgggaggcggatgttgcagtgaaccaagattacttcatgccactgcattccaacccgggagatggagcgagactctgtctcaaaagagtaatataacgccggatgcagtggctcacgcctgtaatcccagcactttgggaggccaaggtgggcagaccgcgaggtcaggagtttgagaccagactgaccaacatggtaaaaccccgtctctactaaaaatacaaaaattagctgggtatggtagcgcgtgcctgtaatcccagctactcaggaggctgagggaggagaatcgcttgaacccgggaggcggaggttgcagtgagctgaaatcgcaccattgcactccggggcgacagagacagactccatctcaaaaaagtaaaataaaattaaacgaaataaaaaaaaaagtaatcatcaccacttttgacaggctgacctcactacttggtaacatcaccattaccaccttctgaatctcccactttctaagtctactcttcagtcactgttaagtttcatatataatagatagataaatgattgatagatagctagagatcaaatagtgccaggaactgtgatttaaactgaagatcctctttcatcaggccccacttccttcgcttgctgacctcacttcctacagctctgaattcacttccctttcagaacgacagatctttttctctgagtgcccttcctggaagggcctgctttctgccccagtttcccccccattacccttgaccttaacaccacttcttggcattctcagggtttctggcttatggtgggcttgatgccctatgtgcaagaatgagagaggatcttttgggacagctaactatcagtctctaagttcctctagcagcctggattgtgaagccctttcctccttcacttcctgtacattcctgccaagtgtgcgtttatttcttctgtttctgacctcatttcctgtccttggcctgatctcattttccactggcaaactgccatcccactcccacttcctgactctccattctttttctttcctttgggaattcaggatgaataattctttgactgaaagggaactctttgtccagtatcctttgtcctccttgagctgtctctgctgagaactacaagtcccacaatgcacaagaggtgatcttaaaatactcgagaaacttgtatacccttctatcaagtagggatttgctcacggagaccctttgggtgttgactgtagaatggactacaactcccagaagactttggtggagctccccactatcttcatgctctattaccctgaagcttcctgggagttgtagtccaatcacttgtttccacttctctattttctcagactctctattcaacgctgcctgctctcctggatagtaaccctttcacagctggtgcagagctgccggggcctggcgcggagctgggggccatgcctccaggattgagacctaccctgggcgtgttccaggcagccttggagctgaccagccagtgcgagctgcaccctgacctcgtgtctcagacttttggctacttgttcttcttctccaacgcatcccttctcaactcgctgatggaacgaggtgaaggttggctgggagctgtcagggaggcaaagacaggagccactgagactcaggtcatattagacacaccacgggctcaagcctcacctttgggtaccctggagaacaagctccagatcccaggctgaaggataggaagagtctgggaggcaggagcacagagtccagccaaccaactgcctctcatacctttaacacccacaggtcaaggccggcctttctatcaatggtcccgagctgttcaaatccgaaccaacctggacctcgtcttggactggctacagggagctgggctgggcgacattgccactgagttcttccgg

SEQ ID NO: 397 - DNA, 8663 bp, Homo sapiens
gggccacgccgccaggccctggctgggccttctcctgtcgcctgtgcggccgcggcctgcaggagcgcggcgaggcactggccgcctacctggacggccgtgagccagtcctgcgcttccggccgcgcgaggaggaggcgctgctgggcgagatcgtgcgcgccgcagccgccggctcgggagacctgccgcccctcgggcccgccacgctgctggcgctgtgcgtgcagcattccgcccgtgagctggagctgggccacctgccacgactgctgggccgcctggcccggctcatcaaggaggccgtctgggtgagcgccccccaatcgccgtccagccccaccagcgccccaagtcccttctccagcctcccttccctaccttcaacccttttcatagctgggctggatactactgttcccatgacgcctcgggaaggatttggggttttgggttttgtttgtttgtttgtttgcttttgtttttgagacggagtctcgctctgttacccaggctggagtgcagtggcggtcttggttcactgcaacctctacctccggggttcaaatgattcttctgcctcagcctcccgagtagctgggattgcaggcgcctgccagcacgcccggctaattttttgtatttttagtaagacggggtttcaccatattggccaggcttgtctggaactcctgacctcgtggttcgcccgcctcggcctcccaaagtgctgggattacaggtgtgagccaccacacccggtgttttggggttattaagcaaggggcccccccatagaatgctgggagatgtagatccactgcacttagagggaagcccaaactcaccttaggagagctcacctaagcacgaactcaccttaggaagaaaccattatgggagatggtgggggagagatcccactggatgagaagttgacagagatcagtgtgagaattcaccgcagcccattgggcttggagcttggatagcagtgagcgagttcattcttggaggcgaggaagcacaaatccactggacctacagatggaagttccagaaagaaaccattcagagtgggggaaacgttccatcctattgagctagggcctaaccagagaggtttaaggagtttcttgggggtaaaaattggagaagaggacctgaaggagctagatcactcataatcatagggtgtgtatgttttaaaaagtaaggagagaccattctaaagcttgtgggattagaatttgtctcaagagccaggcgtggtggctcatgcctgtaatcccggcactttgggaggccgaggcgggcagatcacctgaagtcgggagatcgagaccatcctggctaacatggtgaaaccccgtctctactaaaaatgcaaaaaattagccgggcatggtagcacatgcctgtaatcccagctacttgggaggctgaggcaggagaatcacttgaacctgggaggcagaggttgcagtgagccaaaattgagccattgcaccccagcctgggcaacaacagggtaactccatctcaaaaaaaaaaaaaaaaaaaaagaatccgtatgaagagtgaaggccggttgcagtggctcatgcctgtaatcctagttctttgggaggccaaggtgggaggatcatttgagctcaggagttggagaccaccggtggcaacatagtaagaccccatctctaagaaaagtaggaccagtctctatgagagttgtgcttctataaaaaccagggtattaactcttaagcccctcagtggatccccctcaccttgattctgatcttactgttccacaggaaaagattaaggaaattggagaccgtcagccagaaaagtaagagaaattctgagcagagtggtctggagggatgcaggggttgggttttgcgtctagttctgtgttcaccccatgcatgccccagtgcaagtttctgcttctccttgcgctcaacttttccagctgcgcaatgggagttggtcttgctctcccacttagacttagatcttggggtttgtaaactatgatgagggttgggcagggatcacaaattccttcctctttttcaagccaccctgagggggtccccgaggtgcccctgactcctgaagctgtgtctgtggagctgcggccactcatgctgtggatggccaacaccacggagctgcttagctttgtgcaggagaaggtgctggaaatggagaaggaggctgaccaagagggtgagctctgactcaggctcaggcttgtccaagtctcccatcatgccctgcacctggggacctgggctcctggctgccgacttctggttctccctcttaaccccaagcctgtcctcagacccacagctctgcaatgacttggaattatgtgatgaggccatggccctcctggatgaggtcatcatgtgtaccttccagcagtctgtctactacctcaccaaggttggcccttgcctcttacttcctgtttgacatagcatcacttcctgtttcacgtaatatcacttcctgtttgtggtaacatcacttcttgtttgaactacactgtgtggctctgatgtcactatttgactcaagattttctgcttttctctgacatgacatcccatctcacccaaggactttgctgttctgacaccacttgttagagcttacatcacttcctgcctttctggcttcttttcctttgtaatcatcacctgggcaaacgcggtggctcacatctgtaatcccggcactttgggaggtcaaggcgggtggatcacttgaggtcaggagtttgagagcagcctggccaacatggtgaaaccccatctctactaaaaatacaaaattagccaggcatggtggcctgcgcctataatcccagctattggagaggctgaggcacaagaatcacttgaacctgggaggcggatgttgcagtgaaccaagattacttcatgccactgcattccaacccgggagatggagcgagactctgtctcaaaagagtaatataacgccggatgcagtggctcacgcctgtaatcccagcactttgggaggccaaggtgggcagaccgcgaggtcaggagtttgagaccagactgaccaacatggtaaaaccccgtctctactaaaaatacaaaaattagctgggtatggtagcgcgtgcctgcaatcccagctactcaggaggctgagggaggagaatcgcttgaacccgggaggcggaggttgcagtgagctgaaatcgcaccattgcactccagggcgacagagacagactccatctcaaaaaagtaaaataaaattaaacgaaataaaaaaaaaagtaatcatcaccacttttgacaggctgacctcactacttggtaacatcaccattaccaccttctgaatctcccactttctaagtctactcttcagtcactgttaagtttcatatataatagatagataaatgattgatagatagctagagatcaaatagtgccaggaactgtgatttaaactgaagatcctctttcatcaggccccacttccttcgcttgctgacctcacttcctacagctctgaattcacttccctttcagaacgacagatctttttctctgagtgcccttcctggaagggcctgctttctgccccagtttcccccccattacccttgaccttaacaccacttcttggcattctcagggtttctggcttatggtgggcttgatgccctatgtgcaagaatgagagaggatcttttgggacagctaactatcagtctctaagttcctctagcagcctggattgtgaagccctttcctccttcacttcctgtacattcctgccaagtgtgcgtttatttcttctgtttctgacctcatttcctgtccttggcctgatctcattttccactggcaaactgccatcccactcccacttcctgactctccattctttttctttcctttgggaattcaggatgaataattctttgactgaaagggaactctttgtccagtatcctttgtcctccttgagctgtctctgctgagaactacaagtcccacaatgcacaagaggtgatcttaaaatactcgagaaacttgtatacccttctatcaagtagggatttgctcacggagaccctttgggtgttgactgtagaatggactacaactcccagaagactttggtggagctccccactatcttcatgctctattaccctgaagcttcctgggagttgtagtccaatcacttgtttccacttctctattttctcagactctctattcaacgctgcctgctctcctggatagtaaccctttcacagctggtgcagagctgccggggcctggcgcggagctgggggccatgcctccaggattgagacctaccctgggcgtgttccaggcagccttggagctgaccagccagtgcgagctgcaccctgacctcgtgtctcagacttttggctacttgttcttcttctccaacgcatcccttctcaactcgctgatggaacgaggtgaaggttggctgggagctgtcagggaggcaaagacaggagccactgagactcaggtcatattagacacaccacgggctcaagcctcacctttgggtaccctggagaacaagctccagatcccaggctgaaggataggaagagtctgggaggcaggagcacagagtccagccaaccaactgcctctcatacctttaacacccacaggtcaaggccggcctttctatcaatggtcccgagctgttcaaatccgaaccaacctggacctcgtcttggactggctacagggagctgggctgggcgacattgccactgagttcttccggaaactctccatggctgtgaacctgctctgtgtgccccgcacttccctgctcaaggtgactcctggtcagctatacctgacccctgacctctgactcctcaacccccctcagccaccttctatattcagctcaccgtcagagctccccttgaaccccatgccatccccagccccagctcagacactgtgggtaacacattggcaggtagaaggaagccagcaccaacaatgactaaactcggctgtgtctgaatcctggtggaacttattaaaaatagtttccaggccaggagcagtggctcgcgcctataatcccaacactttgggaggcctaagtaggtggatcacttgaggccaggagtttgagaccagcctggccaacatggcgaaacgctgtctctactaaaaatacaaaaattagccaggcttgatggcgcacgcctgtaatcccagttactctggaggctgagggaggagaatcgctggaacctgggaggcagaagctgcagtgagccaagattgcaccattgcactccagccggggcgacagagcgagaccctgtctccagaaaaaaaaaaaaaaaaaaagtttccagggtccctcactcagacatgctgagtcagaaagtgtggtatgagacaaaggaacatgatgattaaaacattcattgaacatgaactacctgccaggcaccctgtttagcacttctagtttaatgctgacaaagccccatcgaagtaggtgactgactgttttttggatgaggaaacagaatcaggtaggacaggtcgcttgatttcacttatttttcctttttttttttttttttttgagacggagtctcactctgtcacccaggctggagtgcaatggcatgatctcggctcactccaacctccgcctcccgagttcaagcgattctcctgccacagcctcctgagtagccgggataacaggcacgcgccaccacacccggctaatttttgtaattttggtagagacagggtttcaccttgttgggcagactggtcttgaactcctgacctcaggggatgcgcctgcctcggcctcccaaagtgctgggattacaggcgtgagccaccatggccggccaatttcaattatttattttcctttcttcttaaatatcttacaaaaactgttccccatagacatttatttatttatatcaaatgtttataatgggctgggcgtagtggctaatgcctgtaatgccagcattttgggaggccgaggtggaaggaccgcttgagcccaggagtttgacaccagttggcaacataggggagacaccatctctaccaaaaattttaaaaattagccaggtgtggaggcacacgtctgtggtcccagccactccagaagcagaggtggaaggactgcttgagcccaggaggttgaggctgcagtgagccacagtcatgccactgtactccagcatgggtgacaaagcaagaccctgtctcaaaacaataagaaagaaagtttaccatgcatttaataagccccaggcagtgttccaagtactttacaattttgccatattgcatcctcataccaactctattagatagttcctgttctccaaatttatggatgaggagactaggggacggtgacctgccggaaggtaataagtgacccacctgggatttttgaactcaggcagtctaggtggagtctctgatgttaagcacattgatggttctgacgtcagctacatcaggtgtagacattgtcaaacagatatagagtggccgccatagaataatgaatcccaactgggcgcagtggctcatgcctgtaatcctagaactttgagaagcttgagaccagcctgggcagcatagtgagatcccatctctacaaaaacttaaccaggtgtggtggcgtgtgcctgtagtcccagctactctggaggctggggccaaggatcacttgagcccaggatcacttgagccgggagtttgaggctgcagcaagccacgatcgagccactgcactccagcctgggcgacggagtgagaccctgtctctttaaggacaaaaaaaaaaaaaaaaaaaaaaaatccccaagtaccatcgccagattcaataatataaacgaatggccaatcttatttatttccaccctactcatttcctgtatcctcaattatcctgaggcacatcacatttttacaaattgctgggagcacacccttccccaccatcactttggtgataaacagacttcacagtgcccagaagacactgcagagatgccattatcttcccaccacacccactccccttatggaagcccttccatttcatttcttaactgccccgtaatgaccatcaacctctcacctggtcttcccaccaggcttcatggagcagcctaagaaccgaccaccccaccttgacccccgcccagctgcaccatctgctcagccactatcagctgggccctggccgcgggccgccagccgcgtgggaccctccccctgcagagcgggaggctgtggacacaggtgaggagcaatgggatacagcattggggctgtcagctttcttcttcttttgagacggagtctcgccctgtcactcaggctggagtgcaatggcgcgatcttggctcactgcaacctctgcctcccgggttcaagcgattctcctgcctcagcctcccgagtagctgggattacaggcatgcgccaccacgcctggctaattttttgtatctttagtagagacgggggtttcaccgtgttggccaggctggtctcgaactcctgacctcgtgatccgcccgcctcggcctcccaaagtgctgggattacaggcgtgaaccacctcacctttcttcttttctcaggatcttggagtccagatccccagtctccttctaaccccagattctggacccctgtccctccccaccaggacataagtgcaggacccagccccttcccccgtcaagatacaggagttcaagcccccagctccctttattctctggggttcgcatccctagtccattccctccaccagccacccacccaccacccctaggagtccaggtctcgggactttcactcccctgaacttgactcctccacctttaggaatctgtaaggcaagttcccagccctttctcggggatttgggaagccgtttcccaggcaacggtggccttccatcgtctgaactacaacttccatcatgcccaggggctcctagagtagcgtgtgaacggaccccgccccaggagttgctggggtttgtagtttttttcttcctttgggtgtgacgcagcctcggctcttcccgatgcaactacctcactcccactttcagactctaaccgcgccgccttcggcctcacaggggacatcttcgaaagcttctcctcgcacccgcccctcatcctccccctggggagctcgcgcctgcgcctcactggtccagtgacggacgatgccttgcaccgtgaactccgtaggctccgccgcctcctctgggatcttgagcagcaggagctgccagccaattatcgccatgggcctcccgtggccacgtctccttgagaaccaataccaaacgagcgcgcgaaccttgaaatgtcacgggcttctacggacaggagcccgcctgagcgcaaagctttctgggagttgtagttcttatcccgcgtggaatgttgggagattgagttttcgggaagtagcggatgggacggtgggagcatgggcttaggatgtgaatgccagggagcaataaaggtatccgtggtatcggca

SEQ ID NO: 398 - DNA, 210 bp, Homo sapiens
gacatcctgccgcgtcactgcacagtgcgcgcgggccctgagcacccggccatggtgcgcccgtcccggggcgccccagtcacgcacaacgggtgcctcctgctgcgggaggctgagctgcacccgggcgacctcctggggctgggcgagcacttcctgttcatgtacaaggacccccgcactgggggctcggggcctgcgaggccgccg

SEQ ID NO: 399 - DNA, 205 bp, Homo sapiens
gacatcctgccgcgtcactgcacagtgcgcgcgggccctgagcacccggccatggtgcgcccgtcccggggcgccccagtcacgcacaacgggtgcctcctgctgcgggaggctgagctgcacccgggcgacctcctggggctgggcgagcacttcctgttcatgtacaaggacccccgcactgggggctcggggcctgcgaggc

SEQ ID NO: 400 - DNA, 210 bp, Homo sapiens; identical to SEQ ID NO: 398

SEQ ID NO: 401 - DNA, 1942 bp, Homo sapiens
aaaaaaaaaaaaaaaaaagagagacaacaatgagacagattggcacatgtatgccctgagaaataaatcaacagctcccactaaaattctcaatacgctagacagatttaaaagtacaatctggtactttctcttttttgagatggagtctcaccctgtcggccaggctggagtgcaatgcacgatctggctcactgcaacctctgcctccccggttcaagcgattcccccgcctcagcctcccgagtagctgggatcacaggcatgcaacaccacgctcggctagttttttatatctttagtagagatgggggtttcaccatgttggccaggctggtcttgaactcctgacctcatgatccgctagcctccgcctcccaaagtgctgggattacaggtgtgggccgctacacctggccccaatctggtactttcaatgttgcctataaacagatttcagctgaagctcagatggtaaggttaagatgcctggggactgggatggatggacgggcaggagggttggaagagaagtaatccaattagcattgaaaataagagcgccaatttggaaaatcgaatgtctatgatcattttcttccctaaaacagggaagaaagtgaatgtggaaaatccgattttcagcaatattcgcaggacctaaggcaacaaccacatgcctggggcaactatactttccaaatcctgaatattaaaaaggttttcacatggtaatcatcttaatattttctgttttttagatgaagttttgctcttgttgcccaggctggagtgcaatggtgcaatcttggctcacctcaacctctgcctcccgggttcaagcgattctcctgcctcggcctcccgagtagctgggattacaggaatgtgccatcacccctggttaattttgtatttttttagtagagatggggtttttccatgttggtgaggctggtctcaaactcctgacctcaggtgatccgcctgccttgccctcccaaagtgctgggattacaagcatgagtcaccgtgccaggctaattgtgtcctttttaaaggaacaaacaatttgactgttgtgcaaatgaggcttacctggtctgaatatgaagcacctgccctgggctgctgtctcagggcaggaaagtggggtggtcagaaaggcagccaacactgtttctgctgccactgtcactaagcctggagtgcccgttttcaactgcagtgatctggtccctaacatttagcctaaacagtgagctggtaaacaaagcccctgccagcagagaaaaggggctctagagctgttgaaggattggccaggccggttcttttcttatctctgttgttctcgaggaaattcctctaaggtgagccaaggtcagtggctcattttaacttagagtaactctctggggactctaaccagacttccaacagtgctctgggccccttagtaagttcccagggaagcagatgaaactaattaggacatggcccaccaaaggcgacacaagcattttccccgctgtgcacagagacctccccacaactggggcaaaggccgtggaggaaatctttcaagcacagaggggtccgcggtcactgtccccaccttcagctctctgccctgacaacctcagcctgttttcaccatgtttcttctccccaaggcacaaatatttctttttaacttatttttgtgatgtacccaactaaccacaaagccaggcctgctgggatgaggataaaaatcaaataaacaatcctctcaacgtccaggaaatggctgccaggccttctgacttcatgaaacgccggggccagctgtgctcttctatgctgggtcctcttcgtccattgccacattgctgtttgtattcttcttctgctcagcctctggctctgcaggcagaatgctggtgacggtgtggagaag

SEQ ID NO: 402 - DNA, 464 bp, Homo sapiens
tttttttgggggggcaggacagagtcttgctctgtcgccaggctggagtgcagtggcacaatctcggctcactgcaacctccgcctctcaggttcaagcaattctcctgcctcagcctcccgaatagctgggactacaggcacgagccaccacagacagttaactgttcgtatttttcgtagagacggggtttcaccatgttggccaggatggtctcaatctcttgagcttgtgatccacccaccttggcctcccaaagtgctgggattacaggcgtgagccactgtgccaggcacacatctgtaatttaatgaactgtatcagcaacacggttgatgatgcccactatgtgccaaatggtttggagccttcttctaatcctcactcccactagcaacagccctgcagggaggcctcccatgtgtctggagctgcatcttgcacttcccatccggcatttcctt

SEQ ID NO: 403 - DNA, 2534 bp, Homo sapiens
atatatattatatttatgtattatattttgtacaatagttgatcttgaatgcagacttcatttgtatttttcgtggtactacaaaatgtgtagaagttatggcttttctttcattagggtcttgttaggtggttggcaagtaagttaaattgtatgttgcatttttttccatgctgttttaacttgtaaatatatatgtatacatatggaagatattattattatctagattactttaagccttttatctgatgtattatcagtgaaaaccatgctgcttattccctaatacaatggttctcaaactttagtgtgtatcagaatcaagatgagggcttgtaaaatatagctggtccctactcccagagtttccatttcaggaggtctgggatcaggcccaagaatttgcatttttaacaaattcctaggtgataactgataatgttggttcagggaacacactttcagaaccactgctttaatattttaaataagataatatgtgaggtgtcataaaaaccttcatcaaatccctatctcatttcatttcttaggcattttctctcttataaagtttcctggatttataaattttcattgattttactagaaagttttatttagcttttatttatttattgttctttttaagaaaaaaactgagagtttgaattaaaagtttaaatcattgctaggtccttagttattttttttcttttttctttttttttatttgaagccgtgttgaaatccttgtctcctgtagacccagtggaacccataagtaattcagaaccatcaatgaattcagatatgggaaaagtcagtaaaaatgatactgaagaggaaagtaataaatccgccacaacagacaatgaaataagtaggactgagtatttatgtgaaaactctctagaaggtaaaaataaagataattcttcaaatgaagtcttcccccaaggagcagaagaaagaatgtgttaccaatgtgagagtgaagatgaaccacaagcagatggaagtggtctgaccactgcccctccaactcccagggactcattacagccctccattaagcagaggctggcacggctacagctgtcaccagattttaccttcactgctggccttgctgcagaagtggctgctagatctctctcctttaccaccatgcaggaacagacttttggtggtgaggaggaagaacaaataatagaagaaaataaaaatgagatagaagaaaagtaagaaccaagattcatatgaagtgatattagattgttccttttacaaaagtgtttagcttcaagactggaaagggaatatgagtgtaagtttactatatataaagctaagatgtggatttacaggaagaaccctggtttgaataactgatctgaaattagtagttacctgtaaatggcagatcttttaggaaaataagagaaaggtaagggctcttttgaataaactgctgttttatttgtggcacaactgatcaatcttggaaattctttaagtatttttaataagaaatgaattatcatttcttgccagaatttgctaccttaaggtgattgggaaaattctgttgcaagaacattaacatttagtatgactcctttttactgtattcttgcagttaataactgcagctattatgttaataacaagttgtttgtattttatttttgtttataccagtcttaaagatccaggttctgaataaaaaaattaattgatacaattgatgtgtgctggggtttggaactaaaagtagtttcaacagtgcgtgggttatgacatttcttatgtttctttgttcatgtgtgtatttagtagttaattttaagatgtcctagtgatctttaaaagaaaaatattgtaccattttttagaattacactttcacctttctttttgcaattgaaagtgatgatgtcaaagtgggatttctgtactccaaggccccacccccaatttagcaagcagaaaaacgttccttgtatcactttaccttggataattgggtgccattaacacaaacaggtcacaatcctgctgttttctagccctgtccaccataatgagattcaggaaacatcctgtcagcctcctggaaagcatccttgtctccttagtatttcatttacaaactacctcttaacagagactgcttttcaaattggccaatcttacctgttttgtgttgtgattgcattttcaaagagtaattattttcagcatatacagttttgaaacctgtagctcctatgcaataacatagttctatagacattatttgggggaaatgtagtaataactcaatctatgttgctgtcctagaaaggaaattgcatgatgaatctagattgtctttagagtaaagaaacacattcaaattcctgtaacttatcactttcagtgagtaaatttacttataccaaaggggattttttttctttcaggaatctaaggaaatttactttttaacctgagaaaaaaacttggttctgctttatataaacagtaga

SEQ ID NO: 404 - DNA, 772 bp, Homo sapiens
ctctctcaaaaaataataataataataataataataataattcatgcttacccctttaccaagaattctgccttctccaccaagctgtcctctctactagtctctccttctccatgaatccttctctgagtgctccagctctgccgcctctcctaacactacagaccctcacactagaggaacattgtgataaaatataaaggaagtcttgaaccccaaagcatatagcagagaagggaaatgattaacagattgatttcctgcaatctgttcattcatatactgggcctacatacatcagagattaattttaggcactgttgttttctatatgttcagggttttgttttgttttgttttgtttgtctctgtaacaaaattacagtcttcttaaataggggccttattatcccacagcattcattcagcaaattactcattcaacaagtagttattaggtacttgttatatgtcaggcactgtttactgctgtatccctagcgcaaagatcaagagacaaaatgtaaagcctcctacctgcctcaaggcttaaattctaacacactcgtcaattgatcctctcattactcagattatatccaccccatttaattagtaataattgtgaactatcaaccaacttctaatatatgttgcttcctttaagagctaacagatttataaactaagaatgtacatatattgaaaatagcattgtatataaacttatatccttttttattgtttagtgtttcttcatatagctttaaaa

SEQ ID NO: 405 - DNA, 676 bp, Homo sapiens
cttgaagaagttcccattggctgaatctgggacaatttgaacatccaaataaatatgatagtaatggcttataacccattgaataaaatccatgagtccattcagataatgaacaatcagctgggcacagtagctcacgcctataatcccagcaccttggggctgaagcaggagaatcacttaaggccaggagttcaagaccagcctgggcagcatagttgagacccccgtctgtactttttaaaaataaaaataataaaataaaaaatttttaaggaggtaataaacaacaaggtcaagcccattacagctgattaaaatctaataaatataaaaggaatgataacatcagaaaatcaccataactgtcatagctacaattaattgaggcaagagtcatcaagggatgcccaaattttgggacaataataacctccttacttggaaaatgaaatggtaacttcacagtggagaaagcaaatggacactaagttacccaagtggtaaaagttaacaatcctaataataaaacaaaatgacataatcacttatgtagtattgatgccaaaaaatgtattacctgaatctagtcatgaaggaactccagatcagcccagattgaggaatgctgtacaaatcaagtggcctgtactcttttaaaatgctaataacattt

SEQ ID NO: 406 - DNA, 8210 bp, Homo sapiens
tgatccgcccgcctcagcctcccaaagtgctgggattacaggcatgagccaccgtgcctggcctcacaacccaaatttctattgaatgcgacaaattctagtctcctgttgagcaagaaaaatccatacactgtagatgaatacataagtgctgcttgtgcactctgagagtcataaaaatgagatcatccttagcttttgttaagtgcatttggtattgtgacatgaaccagaggtatgcttcagtcaatgatttatagcaacaatcaaatccttgagacggtggtttggtgtcgataataacgtacctcactgtgagtcactgacttacttcagattttctttaattcaagagcatcaaccttcaagaagtgaggaggactctgtcttctcacaattctagggaatgaatgtctgaaccagaatgattgtgtatcccattaacaaaagccctagagaacctggaatggctggttcagccctaaatgctacatctgacctaaagtgtgcaatcatccgagagctgtttcacccttagccaggcatgtgctaaaagcttggggcatcactttctttctttttcttgagatggagtttcgctcttgttgcccaggctggagtgcaatggcatggtcttggctcactgcaacctccacctcctgggttcaagtgattctcctccctccgcttcccaagtagctgggattacaggcacctgccaccatgcccagctaatttttgtatttttagtagagatggggtttcaccatgttggccaagctggtctcaaactcttgacctcaggcaatccaccggccttggcctcccaaagtgctaggattacagacgtgagccaccgcgcccagcctggggcaccactttcaaactgtccttctcaagatcttattgacagtaaaactgtacccctacaactgtcctattaaatgactaaaaacttttactattgaatccacggcagcaccaaacaaattaatcaaaacgttttggaatacattcctttctttgaagctaagttgatggcttgattcaattattgtgtccatttacacaacgtaggctaaatgtttcctagaattggcaaaggatcaaagggttactttacttattcatcatcttaaataacccaagaaagcctttatattattattattattattattattatttgagacagggcccagctctgtcacctaggctggagtgcagtggcacaatctcagctcactgcaacctctgcctccaaagctaaagtgatcctcctacctcaagtgatcctcctacctcagcctcccgagaggcggggaccacaggcgcaccaccgcaaccggctaatttttgtattttttgtagagatgatgtcttgccacactgcccaggctggtctcaaattcctgagctcaagtgatccacccacctcagcctcccaaagtgctggcattacaggagtgagcgccaggtccaagaaatcctttcaaagtaaaataccacaggacatggtggctcacacctgtaatcccaacacttcaggaggccgaggtgggaggattgcttgagcccagagttccagaacctccccacccactgccccatgcaacatagcaagaccttgtcactacaaaaaatttaaaaattagctggtgtggtgttgcgtgtaggtcctagctactcaggaggctgagacaaaaagattgcttgaggctaggcattcaagattacagtgaggtgctgggtgcagtgtctcaggcctgtaatcccagcaattttggtggccgaggcaggtgtatcacttgagctcaggagctcgagaccagcctgggaagcatggtgaaaccctgtctctaccaaaaatacaagaaattagctgggcatggcagctcaagcctgtggtctcagctactcaggaggcggaggtggaaggatcacttgagcccaggacgcagagattgcaatgagcctagatcccgccactgcactccaggctgggtgacagagtgaaaccctgtctctaaaaaataataattaaaggtaccaaaaataaataattgatggtaatgccgacccaaattaaatttaaccttcaaattacttatgaaaaatgtagtatatcataagaaagtcaatagtaagaaatttcatgttaagacagtgttttcatatattttaacattttacatataaatagtatgctaattgcaaattcattttatttaatgtttaatagtttatgttatgaattcaaggcattttctatacttgtcaataatgaaaaggcatttctccttttaaaaattctatgaagtcagccttcttattccttaggaacatgaactagtgtggtttggttttgaatctgattgttcaaacactttacaaagtgaataggaaaataatttgggaacatttatatttaaacttgtcaatctatgattctgtttttcatgtgacagccaatcacaatgtgttctctactcaggaagtttagctcagtatatggattaacacgtgttctacttgtgtgatatttcttatgacaaccacagaaaacatatggggctgggcacagtggcttatgcctgtaatcccagaactttgggaggccaaggcgggtggatcacttgagcgcagtaatttgacaccagcctgggcagcatgtcgaaactgcgtctctacaaaaaataccaaaattaaccaggtgtggcggcacatgcctgtaatcctagcttctcgagaagctgaggtgggaggattacctgagccggggaggtcaaggttgcggtgagccgtgatagtgccactgcactcaagcctgggtgacagagtgagaccctgcctaaaaaagaaaagaaaagaaaagaaaacatatttgatgcaattttaaaaagaatatacctttgagatagagtctcactcttgttgcccaggctggagtgcagtggtgcaatctcggctcactgcaacctctgcctcctgggttcaagcgattctcctgcctcagcctcctgagtagctgggattacaggtgcgcaccactgtgccctgctaatttttgtattttcagtagagacagggttttgccattttggccagactggtctggagctcctcatctcaagtggtcctcctgccgtggcctcccaaagtgttgagattacaggcatgagccaccgcgcctggcctagatttaattttttcataaaactttcacatttgtttgtttgtgatgttttcaggtgctaatttcttgacctagtatagaagcataaacaagagttcaatcctttttaaatagttgtctgtgctgtgaatgccctcgcccaccatgtgctcaacaaggacctcaaggacattgttggtgacttcagaggcttctataggcagctcacaagtgatgggcagctcagatgggtaagggacctattttgtaaaatgcttacataagtaatattaccaaggtctgagatgtcctttgagtgcaacgaatgtgaaaatagagatgggtttatttatttgtttatttatttattttttgagatggagtctcactctgtcacccacgttggagtgcagtgatgcaatcttggctcactgcaacctccgcctcctgggttcaaacagttctcctgcttcagcctcctgagtagctgggactacaggcatgcactagcacacctggctaatgtttgtaattttagtagagatggggtttgaccacgttggccaggctggtctcgaactcctgacctcaagtgatccgccttcctcagcctcccaaagtgctgggattacaggtgtgagccaccatgcccatcctagagatgtgtttataattttaaagtaaaacattttattcagttaaattcaggcttgagtcatttagatcatcagtattttgaggtaaacaactcatttctgtaagactgatgatctaaatgactcaagactgaatttagctgaataaaatgttctactaaggagatgaggtcctgagatttgggtcctaagagctatctcttctctaaggacctcatctcctcctccctgaattggaaagtgctctagaggataaagtactaaatgggcaatctctttatggagaaataatgtgagtagtgttagagatgtaagagaaggtcaggccgggcgcggtggctcactcctgtaatcccagcactttgggaggccaaggcaggcagatcacgaggtcaggaggtcgagaccatcctggctaacatggtgaaaccccgtctctactaaaaatacaaaaaattagccgggcatggtggcgggcgcctatagtcccagttactcaggaggctgaggcaggagaacggcgtgaacctgggaggcggagcttgcagtgagccgagatcgcaccactgcactccagcctgggcaacagagtgagactctgtctcaaaacaaaaaaaaaaaaaaaaaaaagagagagatgtaaaagaaggtcattaaagagaaaacattaagagaagagcaaatttaaaaagatggaagaccatggtaccttttatgtgtttggtatttgaactataaattcaaggcatgaaaaagttaggctctggagaaaggattccaacacaataaggtgaattcaataccctgacctttgcctttgtcccgtgatactggattttgtcttttcctaacccggcttagtctcccatccatgcactgagaagggcacaagagaatgtactttcaatagtgcctgggatttcatcttttactttatacagagaatattaaacttaccttgaaagatgtcaccttgaagaagttcccattggctgaatctgggacaatttgaacatccaaataaatatgatagtaatggcttataacccattgaataaaatccatgagtccattcagataatgaacaatcagctgggcacagtagctcacgcctataatcccagcaccttggggctgaagcaggagaatcacttaaggccaggagttcaagaccagcctgggcagcatagttgagacccccgtctgtactttttaaaaataaaaataataaaataaaaaatttttaaggaggtaataaacaacaaggtcaagcccattacagctgattaaaatctaataaatataaaaggaatgataacatcagaaaatcaccataactgtcatagctacaattaattgaggcaagagtcatcaagggatgcccaaattttgggacaataataacctccttacttggaaaatgaaatggtaacttcacagtggagaaagcaaatggacactaagttacccaagtggtaaaagttaacaatcctaataataaaacaaaatgacataatcacttatgtagtattgatgccaaaaaatgtattacctgaatctagtcatgaaggaactccagatcagcccagattgaggaatgctgtacaaatcaagtggcctgtactcttttaaaatgctaataacatttaaaaaagaagaagaaaaattattccaggtaaaaagagactaaagaggcatggcgactaaatgtaatacgtgatcccagatgggatatggattagggtaaaataaaatacattattggaaaaaactggtgacatttgattatggactggcctttagacagcaatattctatcaatgttatattccctgagtgtgattattgtactacggttatgtaagaaaatatccttgttttcaggaactatacactgatgtatttagggttaagagagcatgatatttgcaactttattcaaatggttcagaaaaaagaagtacatatgtgtgtgtgttcatatgtatatacatacatatacttaacatatatatagagagagagaaagaagagaggaaaacacaggtgtttttcctgctattcttaaaactcttcaataggttagcaactgttttttttaaacttaacctttaggtgggtttctattgctaccttttaattcttgagatgtgtccctggacggaagacctaaatatctttctctctctctctttttttttttttttgagacagagtcttgctctgttgcccaggctggagtgtagtggtgcgatcttggctcactgcaacctccgccttctgggttcgagagatcctcttgcctcagcctcctgagtagggactacaggcacaaaccaccacacctggctcatttctctgttttcagtagagacggggtttcaccatgttggccaggctggtcttggtcccaaagtcctgggtttacaggcatgagccatcacacccagccctctttttcatttctaaaaagtgcttttgtactttgcttcctaaccagattggtccagaaaagggcgtggtgcacctggcgacagcggccgtcctaaacgcggtgtgggacttgtgggccaagcaggagggaaaggtaacccctctcacaaacgctcaggaggctcctgggagctgtacgacactgactttccctacgcacagaggaaagacagacacactgcagcccccaaaaggaaatacagataattgctttggtgtttttttctcctctgagaggttttggcagtaggtagggaactgcaggaggaggagaaagaggagacaggatggcggaaggcgcaggcagcagtagaggggggtgtggggacctggtggctgacagccagcattagagctgccaacgcgtttactgtcaggaaaaaatggggactttacacatatgtcttacaaatcctttcttttttacttcaagcctgtctggaagttacttgtggacatggtgagtagcattgttaatgttacaattgtttctgtaaatgaaatggatatcattgatgacatgccttttgatgatcagtaaatatattcaggactatctgttgatcactatagcgatgataaagcaaaaagccaataaaatatgacattccttttctgatatctgacgtaacagatggctgtgctcatgcaggcagggtggcatgaggggaagcagtgagggggtcctgcctcccccactgtgcatgtgtaacacacggtgccagttctctgagcctccattgcctgactatgacaagaggatcatcctaacttctctaggaacctcacaaaattaaagatcaatgagaaaagcacctcataaactctgaaaagccagatgttataatattatgaagatattatccaggccaggcatggtggctcaagcctgtaatcccaatactttggaaggctggaggatggcttgagcccaggagtttcaggctgcagtgagctataattgcaccactgcactcaggtgacagagcaagaccctgtctcaaaaaaagaaaaaagaaaagatactatccagtcactttgacaccaagaataagatcaggccattgtagcctctactgtacaattccagcagggaaggagctcaacactgaattctaaagctatgcacttgactgttttctttctccttgaccttttcatagcaggggtgaacaactggatgctgaggaggaaaaaactgggcaaattaaaggggaatgagcttcagaccccatgcagagctggctgtgagtccgggtttcactgctcaccagctgcatgaccttgagcatgtgacttccccactctgagctgcggtggcctcagtgcaacacctgggtggcggttaaaaacctcgtgatccacaaatgaaggcccttgttattagttggcaaaaaattaaggaaaaacaaagaacaccatggccttgaagagtgttgggcaggagactgctcctcctccggaggaaagtgaagacaggaggctgtcacatcgtctctgacatggagagtggcttccgggccatccgtaggggaaggacacagagctcttgagcccccttctagattcaaggttggcgttttacggggatggaggaggtagccaccaaaagggaatgatttgcaggccaccagaaatgtgcctgaggtcccacctgtggaccctccatttttggatcctgttccctttcaatgccagtactcttttcttttttctttttttctttctttcttttttttttttttagacggagttttcttcttgttgcccaggctacagtacagtggcatgatctcagctcactgcaactgattcaagcgattctcctgtctcagcctcctgagtagctgggattacaggcacccgccaccatgcccagctaattt

SEQ ID NO: 407 - DNA, 676 bp, Homo sapiens; identical to SEQ ID NO: 405

SEQ ID NO: 408 - DNA, 676 bp, Homo sapiens; identical to SEQ ID NO: 405

SEQ ID NO: 409 - DNA, 5299 bp, Homo sapiens
tttgagatagagtctcactcttgttgcccaggctggagtgcagtggtgcaatctcggctcactgcaacctctgcctcctgggttcaagcgattctcctgcctcagcctcctgagtagctgggattacaggtgcgcaccactgtgccctgctaatttttgtattttcagtagagacagggttttgccattttggccagactggtctggagctcctcatctcaagtggtcctcctgccgtggcctcccaaagtgttgagattacaggcatgagccaccgcgcctggcctagatttaattttttcataaaactttcacatttgtttgtttgtgatgttttcaggtgctaatttcttgacctagtatagaagcataaacaagagttcaatcctttttaaatagttgtctgtgctgtgaatgccctcgcccaccatgtgctcaacaaggacctcaaggacattgttggtgacttcagaggcttctataggcagctcacaagtgatgggcagctcagatgggtaagggacctattttgtaaaatgcttacataagtaatattaccaaggtctgagatgtcctttgagtgcaacgaatgtgaaaatagagatgggtttatttatttgtttatttatttattttttgagatggagtctcactctgtcacccacgttggagtgcagtgatgcaatcttggctcactgcaacctccgcctcctgggttcaaacagttctcctgcttcagcctcctgagtagctgggactacaggcatgcactagcacacctggctaatgtttgtaattttagtagagatggggtttgaccacgttggccaggctggtctcgaactcctgacctcaagtgatccgccttcctcagcctcccaaagtgctgggattacaggtgtgagccaccatgcccatcctagagatgtgtttataattttaaagtaaaacattttattcagttaaattcaggcttgagtcatttagatcatcagtattttgaggtaaacaactcatttctgtaagactgatgatctaaatgactcaagactgaatttagctgaataaaatgttctactaaggagatgaggtcctgagatttgggtcctaagagctatctcttctctaaggacctcatctcctcctccctgaattggaaagtgctctagaggataaagtactaaatgggcaatctctttatggagaaataatgtgagtagtgttagagatgtaagagaaggtcaggccgggcgcggtggctcactcctgtaatcccagcactttgggaggccaaggcaggcagatcacgaggtcaggaggtcgagaccatcctggctaacatggtgaaaccccgtctctactaaaaatacaaaaaattagccgggcatggtggcgggcgcctatagtcccagttactcaggaggctgaggcaggagaacggcgtgaacctgggaggcggagcttgcagtgagccgagatcgcaccactgcactccagcctgggcaacagagtgagactctgtctcaaaacaaaaaaaaaaaaaaaaaaaagagagagatgtaaaagaaggtcattaaagagaaaacattaagagaagagcaaatttaaaaagatggaagaccatggtaccttttatgtgtttggtatttgaactataaattcaaggcatgaaaaagttaggctctggagaaaggattccaacacaataaggtgaattcaataccctgacctttgcctttgtcccgtgatactggattttgtcttttcctaacccggcttagtctcccatccatgcactgagaagggcacaagagaatgtactttcaatagtgcctgggatttcatcttttactttatacagagaatattaaacttaccttgaaagatgtcaccttgaagaagttcccattggctgaatctgggacaatttgaacatccaaataaatatgatagtaatggcttataacccattgaataaaatccatgagtccattcagataatgaacaatcagctgggcacagtagctcacgcctataatcccagcaccttggggctgaagcaggagaatcacttaaggccaggagttcaagaccagcctgggcagcatagttgagacccccgtctgtactttttaaaaataaaaataataaaataaaaaatttttaaggaggtaataaacaacaaggtcaagcccattacagctgattaaaatctaataaatataaaaggaatgataacatcagaaaatcaccataactgtcatagctacaattaattgaggcaagagtcatcaagggatgcccaaattttgggacaataataacctccttacttggaaaatgaaatggtaacttcacagtggagaaagcaaatggacactaagttacccaagtggtaaaagttaacaatcctaataataaaacaaaatgacataatcacttatgtagtattgatgccaaaaaatgtattacctgaatctagtcatgaaggaactccagatcagcccagattgaggaatgctgtacaaatcaagtggcctgtactcttttaaaatgctaataacatttaaaaaagaagaagaaaaattattccaggtaaaaagagactaaagaggcatggcgactaaatgtaatacgtgatcccagatgggatatggattagggtaaaataaaatacattattggaaaaaactggtgacatttgattatggactggcctttagacagcaatattctatcaatgttatattccctgagtgtgattattgtactacggttatgtaagaaaatatccttgttttcaggaactatacactgatgtatttagggttaagagagcatgatatttgcaactttattcaaatggttcagaaaaaagaagtacatatgtgtgtgtgttcatatgtatatacatacatatacttaacatatatatagagagagagaaagaagagaggaaaacacaggtgtttttcctgctattcttaaaactcttcaataggttagcaactgttttttttaaacttaacctttaggtgggtttctattgctaccttttaattcttgagatgtgtccctggacggaagacctaaatatctttctctctctctctttttttttttttttgagacagagtcttgctctgttgcccaggctggagtgtagtggtgcgatcttggctcactgcaacctccgccttctgggttcgagagatcctcttgcctcagcctcctgagtagggactacaggcacaaaccaccacacctggctcatttctctgttttcagtagagacggggtttcaccatgttggccaggctggtcttggtcccaaagtcctgggtttacaggcatgagccatcacacccagccctctttttcatttctaaaaagtgcttttgtactttgcttcctaaccagattggtccagaaaagggcgtggtgcacctggcgacagcggccgtcctaaacgcggtgtgggacttgtgggccaagcaggagggaaaggtaacccctctcacaaacgctcaggaggctcctgggagctgtacgacactgactttccctacgcacagaggaaagacagacacactgcagcccccaaaaggaaatacagataattgctttggtgtttttttctcctctgagaggttttggcagtaggtagggaactgcaggaggaggagaaagaggagacaggatggcggaaggcgcaggcagcagtagaggggggtgtggggacctggtggctgacagccagcattagagctgccaacgcgtttactgtcaggaaaaaatggggactttacacatatgtcttacaaatcctttcttttttacttcaagcctgtctggaagttacttgtggacatggtgagtagcattgttaatgttacaattgtttctgtaaatgaaatggatatcattgatgacatgccttttgatgatcagtaaatatattcaggactatctgttgatcactatagcgatgataaagcaaaaagccaataaaatatgacattccttttctgatatctgacgtaacagatggctgtgctcatgcaggcagggtggcatgaggggaagcagtgagggggtcctgcctcccccactgtgcatgtgtaacacacggtgccagttctctgagcctccattgcctgactatgacaagaggatcatcctaacttctctaggaacctcacaaaattaaagatcaatgagaaaagcacctcataaactctgaaaagccagatgttataatattatgaagatattatccaggccaggcatggtggctcaagcctgtaatcccaatactttggaaggctggaggatggcttgagcccaggagtttcaggctgcagtgagctataattgcaccactgcactcaggtgacagagcaagaccctgtctcaaaaaaagaaaaaagaaaagatactatccagtcactttgacaccaagaataagatcaggccattgtagcctctactgtacaattccagcagggaaggagctcaacactgaattctaaagctatgcacttgactgttttctttctccttgaccttttcatagcaggggtgaacaactggatgctgaggaggaaaaaactgggcaaattaaaggggaatgagcttcagaccccatgcagagctggctgtgagtccgggtttcactgctcaccagctgcatgaccttgagcatgtgacttccccactctgagctgcggtggcctcagtgcaacacctgggtggcggttaaaaacctcgtgatccacaaatgaaggcccttgttattagttggcaaaaaattaaggaaaaacaaagaacaccatggccttgaagagtgttgggcaggagactgctcctcctccggaggaaagtgaagacaggaggctgtcacatcgtctctgacatggagagtggcttccgggccatccgtaggggaaggacacagagctcttgagcccccttctagattcaaggttggcgttttacggggatggaggaggtagccaccaaaagggaatgatttgcaggccaccagaaatgtgcctgaggtcccacctgtggaccctccatttttggatcctgttccctttcaatgccagtactcttttcttttttctttttttctttctttcttttttttttttttagacggagttttcttcttgttgcccaggctacagtacagtggcatgatctcagctcactgcaactgattcaagcgattctcctgtctcagcctcctgagtagctgggattacaggcacccgccaccatgcccagctaattt

SEQ ID NO: 410 - DNA, 323 bp, Homo sapiens
ggccgggcgcggtggctcactcctgtaatcccagcactttgggaggccaaggcaggcagatcacgaggtcaggaggtcgagaccatcctggctaacatggtgaaaccccgtctctactaaaaatacaaaaaattagccgggcatggtggcgggcgcctatagtcccagttactcaggaggctgaggcaggagaacggcgtgaacctgggaggcggagcttgcagtgagccgagatcgcaccactgcactccagcctgggcaacagagtgagactctgtctcaaaacaaaaaaaaaaaaaaaaaaaagagagagatgtaaaaga

SEQ ID NO: 411 - DNA, 553 bp, Homo sapiens
aaattctatgaagtcagccttcttattccttaggaacatgaactagtgtggtttggttttgaatctgattgttcaaacactttacaaagtgaataggaaaataatttgggaacatttatatttaaacttgtcaatctatgattctgtttttcatgtgacagccaatcacaatgtgttctctactcaggaagtttagctcagtatatggattaacacgtgttctacttgtgtgatatttcttatgacaaccacagaaaacatatggggctgggcacagtggcttatgcctgtaatcccagaactttgggaggccaaggcgggtggatcacttgagcgcagtaatttgacaccagcctgggcagcatgtcgaaactgcgtctctacaaaaaataccaaaattaaccaggtgtggcggcacatgcctgtaatcctagcttctcgagaagctgaggtgggaggattacctgagccggggaggtcaaggttgcggtgagccgtgatagtgccactgcactcaagcctgggtgacagagtgagaccctgcctaaaaaag

SEQ ID NO: 412 - DNA, 8886 bp, Homo sapiens
gcacgaggccccgccgaaatgttggtaagtggtcagccaagtgggccgctcactcccggttcacccactgtgtttctgtcagtgaagcaaacatccccatttggcaggagaagaagctgccggaggtcacactgctagtgattggtggcccaggggtagggcagccttctttcctctgcagttcactgctccagaaccatctccagcctcatagctcaccgtggacagccctgcggtgtggcgctgatgtacagagtgatgccaggcgttcatctccccactgagctcctgctgagtgtttgcctggggccaggtcctccttccgggaagtcattttagctggaaagaacagggtgggggcgggtggcaagggatcagagcatgagcgtttgagggcttcgtcaggggcagtgaggagcctctaaaggactctacatttaggaatgacagagtcaaacaatttaacaaagccctaaaggtccctgccaggaaagaatgagccccatgtatcaccataagcaacttcttagaaacataacccacccctgtcatcccagcactttgggaggccaaggagggaggattgcttgaagccaggagctcaagatcaacctggtcaacatagtgagaccccatctctacaaaaataaaaataaattagccgggcatagtggcacatacctggagtcccagctactcaggaggctgaggcaggaggatcacataagccagggagactgaggctgcagtgagctatgatggcatcactgcactccagcctgggcaacagagtgagaccttgtctctaaaaaaagaataataaattttaaaaaacaaaatataacccaccttataattgattcaggcctcttcccctcctgtcacgttgccaggatcccaggatgctggtatcctgcatagatttcaggtacatcactgatgtcctgactgaggaggatgccctaggtgagtttggaagctttctgggatacacgacgtgcacacacagtagtggcatgctttgtttcctaaaagagtgagtgatgctttttatttcttccagaaatactgcagaaaggtcaaattggtaaaaaagaaagaggtgggttgtaagaaaattttcttcattgtttttgctaacattgtccacttttgagtgcccctgtccttttggggtacacattgtcttcccaaatgccctgtgctgagcagctaggccctcaaatcaacattcaagtctgcatggtgaagcctgctgggtatgacctctgactgcagagtttgcttcagccactgctgaaaggaagtttggctttaggattacactgtagggagagccctgggggagcagggcagtccgtgagagtatcctgatcacctgggtttgacatcctagtaatttgtggctgggtgtgtgtgtgcagggccggatcaggagaacagctggactctccaggggaaacagcttagctacaggcacttccaattccgaagggccctggaaagtgcaaaatgttgacggcgctgtgttttcacagagaagcaaatgctggcacaaggataccctgcttacacgacatcgtgcgcctggctggggtactcagatgacacgttgaagcaggtgggcattttaacctggctttgtagacagctgaatggggagaaaccaacctgtttttccttctgtcctcataccactactctcagtacctcacttctgacaccagatgtgtgtggttttccttctcacgccaaccagttctccacttctctgtggacaccaactgggtgtcctgctattttactcaattctgacagcacatacctggaactagcctcagaccccacaggttaagggctcagtcttacaggactgccctatggcagatgccagtcacaagtccacgttgtcacctgtgcttctgactggctttgcctcagattagaggttcccacaaaccccgctttgagttgaatcatttggtggaatggctcacggaattcagggaaacactacttatgtttactcatttattataaaggatgcaacttaagaacagccaaactgaagagacacacagggcaaggtgtgaggagggggtacagagcttccatgtcccctccaggtgagccacactcccagtacctccacgtgttcaccaacctggaagctctctgaaccctgttccttgggggttttatggaggcttcagtatttagatgtgattcattatttggccattggccatcaattcagccttcagccccctcgcctccccagctatctgggaataggctaaagtttccaaccccacaatcatgcctttcaggtctttctggtccccagccccgtcctgaagctacgtaggggacctcagcagggctctctcgttcacgtacaaaagacactcctatcactcaggagatgccaagggttttaggggctgtgtgttgtgtgttaggaaataggggggcagcgatgggggcagagacaaaatatatattccttcttatgtcacatgggcttttgattccagcctctctgggagaaatttaatactttcctgttcacctctctaaatcattttggctgagggcagtggctcacgcctataatcctagcattttgggaggctgaggtgggtggatcacctgaggtcagaagttcaaaaccagcctggccaacatggtgaaaccccgtctctactaaaaatacaaaaaattatctgggcgtggtaatgcgtatctgtagtcccagccactcaggaggctgaggcaggagaatcacttgaacccaggaggcaggggttgcaatgagccgagatcacgccactgccctccaacctgggtgacagaacaagagtccgtctcaaaaaacaacaaaaaaattattttggatccaagccctcgttctgaaagtacacaagcaaatgcaaagccattcattttgtggaccgcaggactctgtgacttagtgagtcaccttgggctctggaaggtgacagcctagggtaagattcctgggcagcaccagcggtagacccactgcgagattgagaagtaatgcctatttcatggggtggttttgaggattcagatacatgctgtaagttgcgtcatgctcaaggcaccatggctggcacatggcatgcagtcggcacatggtggatttattactgtttctccttacactgtgcccacttctagagagtggagagagaggctggcttctgcatgttactcttatatccactcattctatggatgccacagaatattctagctttaaaaagagagagatcagtgctatcttccccttccgggaaggttgtgaccattaaaaaaatggttcccatagagatgaggaaagaaagtcaccctacaagtaaaaagtgatctctgtcagccaggctgtttctgctgttaatttcaacaacacatgggtgttactctggtctatgctataaccgtaatgcttgtgaaacagatcagcaatgactgacttcctggtcagaccaaggggctctctccagtgtgtgaccctgtgctcctttcccacagctctgtgcccaggcgctgaaggatggctggaccaggtgagtgtgatgatggacctgactttcccagttggcggcaggagagactcaggcagtaagtctctcctggcagggagccaaggagtaaaaggcacccacgggctaggatccccctggctcatagggatgcataagagaagtttccccttaggccaggctctttctctaaaggcaggatgtgagtcctcattagaattataggccatcagagttgaaagaggcttgggagattgtttatttcgggcactaacctagagtagaaatccagtctttactgtcagtaacagcgttgattcagtttctgcatgaacatctccagaggcagcgagcttaacttggtgaggcactttccattctttgagggctttgagtattaggtgggtcttttcttctcttttttttttttgagatgaagtttcactctcgtcacccagactggagtgcagtggcgcaatctcggctcagtgcaagctccacctcccggattcaagccattctcctgcctcagcctccctagcagctgggattacagacacccgccaccacacctggctaatttttgtatttttaatagagacagggtttcgctatgttgatcaggctggtcctgaactcctgacctcaggtgatccgcctgcctcagcctcccaaagtgctgggattataggcgtgagccactgcacccagccaggtgggtctttaatatcagcaaccctttgcttccatgtaatttccagccagaggtcccagttcccaagagccaggctgttcctcttccacttgagtgccctcctctccctccaggccacctcctttccacactgctcatctgcacttctcccttctgactctcgcctgtgcaggtaaagacctctggccatcctaagaccttctctggatgaacctcgatggttgatgaccctgcatcctgaaacagggcaggatgcagagggaccatcatctcttttgacccagtcactgtgtgtccctcagcacagctcacggtggcactttttgcctgtgacatgtcaccaggcttcctatctgacttgcagccactctggtctctgagcctcctgctactcagtgtgtcctgtggagcaggagctccagcatcacctgggagcttgtgagaaatgcagcctgggcctctccccagacccgctgcctgggaatctgcattggaacaagatcccctagtgattcctatgcgttcttaagttggagaggcactgaattcttgttaatgcctcagctaaataaaggcttgaggagtgagaacttgaaggaggcagcatgaagccgcggaaagaggtgttggcatctgatagaactgaaatcacatcttgccttttcccctcatccgctgcaagtacttgctgtgtgatcaattactcaacctctctgaacttcattttctctcagtagaaataatatgagctttggtcctcctccaagttgccatatctcagaaggaccagcacagggcaggattcagagcagctgctgtaagtgctgtttgccctccctctgcatacccgggggaggctgcagcagtgtatctggtgagtcagagaaggctgtggggagatttaaagggtctcttcccagcacaggaagcctggcacccagagcctaaggccagccaccctctctggagcatcacggatcatgtagttgaagcctccagctggtacagaagagaacagcaggtgcctgagaatgtgcggcactctgcaagctggggctctttgcaaagcagcagggggacctcagccaaggaggcgcacagggagggtaggctgctgttcgagggggcagatgctggcctccccgtggtggtgtcccctcctccacctgccagtgcccacactgaggccagcaacacactcttctgacagcagagtcatagggtgtggacatagaggcccatgtctcaagagaacagctggacatccacagagattaaggagctccctacaagtgtctggatgtggtgtaaaggagacctctgcacggaggctccagccgcactctgctattccctagttacctgatctcatcactttccctcccggaacctcaggcccctgcactgcaggggacagaccatccctgtggccttcctctcactgagttaattcaagacaaagctctcctttgtaaaccagaccctttccattcagtctatcacagtgtggcttactcggcaccccttttcagccccgctctcctcttcagttctcactgtggcttttttgttcttaattccttttcatggcccggcaaaaacggagttaattatattaaagacctgacttccctgtctagctccttaactccaggtcagcagataattgagagtcattgccctgatactgaatgaagagataaagttcccaggtttatttcaagtgacttatctgaagatgaggaaagagcaagaggttactaaaaaacatatctgtgaattgttgacagagacggtcacttctgcagaaactccagatgcccttgccaagtccaggtacaggtctaaactagcaaaccaaatgcattttctaggtttaaagtaaaggtgggtgctgatctccaggatgacatgcgaagatgccaaatcatccgagacatgattggaccggaaaagactttggtaaatatcctctcacaccactaagaagcagtagcctttgtccagggctaaatacaactcgtttcaagattaaagaacattgggaatttaaaaagttaattgtcagaggaagtacacttctgtggtcttgcagtaggcgagctcaaacaaaaataagcaaagggactaatagttttacgttttttaattctgcagaactagttaagtaagtttggggttaaggatcctttcttactaacacagatgtacctgagcaaacagttttcccattggtgctctggtgtgtcaatcatgtaatctcccctcctagctcctcaggtaggagggtgtcagggggccattactgaagaaatgttggaacttcagctgagataaatgtaaggatcagtcatttctgatttgtatttttataaaccagttcttacgtgtaaaatattttcataaagtcacagtaagatgtttttatgaggctttggaggcttttttgcataagttaaaatagaaattttgagttcttgacccaggatcactatttatacatgaattaatgctgctttttttttttaatgaagtcatctgtatccaaataacttatgataaaaattgattctgggctggccagatgctgtggctcatgcctgtaatcctagcactttgggatgcctaggtgagtggattgccggagctcaggagtacaagatcagcctggcaacatggaaaaaccccatctgtaccgaaaaatacaagaaaaaaaagtgttagcattatatggctcatgcctataatcctaacactttgggaggctgaagcaggtggatcacttgaggccaggagtttgggaccagcctgggctacatagcaagactctctctctaaaagaaagaagaaaaaaaattaaccaggtgtggtggtgcatgtctgtaatccctcctactttggaagatggggcaagaggatcactgagctcaggagttggaggctgcagtgagctacaataataccactgcactccagcatgggcaacagagtgagatccagcctcttaaaaaaaaaaaatccattctgagcatactgtcctctggttttcatagtgtcctgggagagagctcttatcacttagcacattctgtagagatgtccatttctccaagcacaataagatcagggatgaggggctgtcccttaagctgggcacagccatcacctggcttccaagaaggatagtggtacacagagagccagggcctaggagggagaggactggacttgaactcaccattcactagatttattgttcttaagcaagttactgaatttctctgcatgacagttttcttatttgtaaaatgggttaatatgaactgcctcatggggttattattattattttttgagatagggtctcactcagtcacccaggctagagtacagcagcatgatcacacctcactgcagccttgacctcccctggctcaggggatcctcccacctcaaccccctgagtagctgggactacaagtgagagccaccacacccagctaatttttgtattttttgtagagagaggattttgctatgttgcccagcctggtcttgaactcctgggctcaagaaatccacaggctgggccagatgcagtggctcatggctgtaatcccagcactttgggaggccgaggcgggcggatcacaaggtcaggagattgagaccatcctggctaacatggtgaaaccccgtctctactaaaaatacaaaaaaaaatagcctggtgtggtggtgggcgcctgtagtcccagctactcgggaggctgaggcaggagaatggcgtgaacctgggaggcagaggttgcagtgagccgagatagcgccactgcactccagccttggtgacagagcgagactctgtctcaaaaaaaaaaaagaaaaagaaaagaaatccacgggcttcagcctcccagagtgttgagattacaggcatgagccaccatgcctggccagttattataaatattaaatggaacaaaatccataaagtgcctagtggagtaggtgtgccattatgggagagttaaggctacttattattgtgccagacacacagtgggcaatagtcaataaatgactattgaacaaacaatgttgattgtgcatgattcagaatgtgacaaaatggtttctacgaacagaaccaacactgcaagacacatgtatttgggtggcatctagatggagattggaccagagcccagggccagcgagcacttctcatggcccagcccagggcactgctggacatccagtggctcctcaagcgattcacggctcctcctaaagactgtacctggagccagagtccccgtctcagcagctgctctctggctctttttgttagggccgtgtgctgggcctcagcagaggcgttagggggtctcactcagctgttggtggcactgagtgacagcatttcctccctgggagccgcagccctgctgtgaggttggctcagggctgacctccctgtgaagagtctctttttgcagatgatggatgccaaccagcgctgggatgtgcctgaggcggtggagtggatgtccaagctggccaagttcaagccattgtggattgaggagccaacct

SEQ ID NO: 413 - DNA, 323 bp, Homo sapiens; identical to SEQ ID NO: 410

SEQ ID NO: 414 - DNA, 8887 bp, Homo sapiens
gcacgaggccccgccgaaatgttggtaagtggtcagccaagtgggccgctcactcccggttcacccactgtgtttctgtcagtgaagcaaacatccccatttggcaggagaagaagctgccggaggtcacactgctagtgattggtggcccaggggtagggcagccttctttcctctgcagttcactgctccagaaccatctccagcctcatagctcaccgtggacagccctgcggtgtggcgctgatgtacagagtgatgccaggcgttcatctccccactgagctcctgctgagtgtttgcctggggccaggtcctccttccgggaagtcattttagctggaaagaacagggtgggggcgggtggcaagggatcagagcatgagcgtttgagggcttcgtcaggggcagtgaggagcctctaaaggactctacatttaggaatgacagagtcaaacaatttaacaaagccctaaaggtccctgccaggaaagaatgagccccatgtatcaccataagcaacttcttagaaacataacccacccctgtcatcccagcactttgggaggccaaggagggaggattgcttgaagccaggagctcaagatcaacctggtcaacatagtgagaccccatctctacaaaaataaaaataaattagccgggcatagtggcacatacctggagtcccagctactcaggaggctgaggcaggaggatcacataagccagggagactgaggctgcagtgagctatgatggcatcactgcactccagcctgggcaacagagtgagaccttgtctctaaaaaaagaataataaattttaaaaaacaaaatataacccaccttataattgattcaggcctcttcccctcctgtcacgttgccaggatcccaggatgctggtatcctgcatagatttcaggtacatcactgatgtcctgactgaggaggatgccctaggtgagtttggaagctttctgggatacacgacgtgcacacacagtagtggcatgctttgtttcctaaaagagtgagtgatgctttttatttcttccagaaatactgcagaaaggtcaaattggtaaaaaagaaagaggtgggttgtaagaaaattttcttcattgtttttgctaacattgtccacttttgagtgcccctgtccttttggggtacacattgtcttcccaaatgccctgtgctgagcagctaggccctcaaatcaacattcaagtctgcatggtgaagcctgctgggtatgacctctgactgcagagtttgcttcagccactgctgaaaggaagtttggctttaggattacactgtagggagagccctgggggagcagggcagtccgtgagagtatcctgatcacctgggtttgacatcctagtaatttgtggctgggtgtgtgtgtgcagggccggatcaggagaacagctggactctccaggggaaacagcttagctacaggcacttccaattccgaagggccctggaaagtgcaaaatgttgacggcgctgtgttttcacagagaagcaaatgctggcacaaggataccctgcttacacgacatcgtgcgcctggctggggtactcagatgacacgttgaagcaggtgggcattttaacctggctttgtagacagctgaatggggagaaaccaacctgtttttccttctgtcctcataccactactctcagtacctcacttctgacaccagatgtgtgtggttttccttctcacgccaaccagttctccacttctctgtggacaccaactgggtgtcctgctattttactcaattctgacagcacatacctggaactagcctcagaccccacaggttaagggctcagtcttacaggactgccctatggcagatgccagtcacaagtccacgttgtcacctgtgcttctgactggctttgcctcagattagaggttcccacaaaccccgctttgagttgaatcatttggtggaatggctcacggaattcagggaaacactacttatgtttactcatttattataaaggatgcaacttaagaacagccaaactgaagagacacacagggcaaggtgtgaggagggggtacagagcttccatgtcccctccaggtgagccacactcccagtacctccacgtgttcaccaacctggaagctctctgaaccctgttccttgggggttttatggaggcttcagtatttagatgtgattcattatttggccattggccatcaattcagccttcagccccctcgcctccccagctatctgggaataggctaaagtttccaaccccacaatcatgcctttcaggtctttctggtccccagccccgtcctgaagctacgtaggggacctcagcagggctctctcgttcacgtacaaaagacactcctatcactcaggagatgccaagggttttaggggctgtgtgttgtgtgttaggaaataggggggcagcgatgggggcagagacaaaatatatattccttcttatgtcacatgggcttttgattccagcctctctgggagaaatttaatactttcctgttcacctctctaaatcattttggctgagggcagtggctcacgcctataatcctagcattttgggaggctgaggtgggtggatcacctgaggtcagaagttcaaaaccagcctggccaacatggtgaaaccccgtctctactaaaaatacaaaaaattatctgggcgtggtaatgcgtatctgtagtcccagccactcaggaggctgaggcaggagaatcacttgaacccaggaggcaggggttgcaatgagccgagatcacgccactgccctccaacctgggtgacagaacaagagtccgtctcaaaaaacaacaaaaaaattattttggatccaagccctcgttctgaaagtacacaagcaaatgcaaagccattcattttgtggaccgcaggactctgtgacttagtgagtcaccttgggctctggaaggtgacagcctagggtaagattcctgggcagcaccagcggtagacccactgcgagattgagaagtaatgcctatttcatggggtggttttgaggattcagatacatgctgtaagttgcgtcatgctcaaggcaccatggctggcacatggcatgcagtcggcacatggtggatttattactgtttctccttacactgtgcccacttctagagagtggagagagaggctggcttctgcatgttactcttatatccactcattctatggatgccacagaatattctagctttaaaaagagagagatcagtgctatcttccccttccgggaaggttgtgaccattaaaaaaatggttcccatagagatgaggaaagaaagtcaccctacaagtaaaaagtgatctctgtcagccaggctgtttctgctgttaatttcaacaacacatgggtgttactctggtctatgctataaccgtaatgcttgtgaaacagatcagcaatgactgacttcctggtcagaccaaggggctctctccagtgtgtgaccctgtgctcctttcccacagctctgtgcccaggcgctgaaggatggctggaccaggtgagtgtgatgatggacctgactttcccagttggcggcaggagagactcaggcagtaagtctctcctggcagggagccaaggagtaaaaggcacccacgggctaggatccccctggctcatagggatgcataagagaagtttccccttaggccaggctctttctctaaaggcaggatgtgagtcctcattagaattataggccatcagagttgaaagaggcttgggagattgtttatttcgggcactaacctagagtagaaatccagtctttactgtcagtaacagcgttgattcagtttctgcatgaacatctccagaggcagcgagcttaacttggtgaggcactttccattctttgagggctttgagtattaggtgggtcttttcttctcttttttttttttgagatgaagtttcactctcgtcacccagactggagtgcagtggcgcaatctcggctcagtgcaagctccacctcccggattcaagccattctcctgcctcagcctccctagcagctgggattacagacacccgccaccacacctggctaatttttgtatttttaatagagacagggtttcgctatgttgatcaggctggtcctgaactcctgacctcaggtgatccgcctgcctcagcctcccaaagtgctgggattataggcgtgagccactgcacccagccaggtgggtctttaatatcagcaaccctttgcttccatgtaatttccagccagaggtcccagttcccaagagccaggctgttcctcttccacttgagtgccctcctctccctccaggccacctcctttccacactgctcatctgcacttctcccttctgactctcgcctgtgcaggtaaagacctctggccatcctaagaccttctctggatgaacctcgatggttgatgaccctgcatcctgaaacagggcaggatgcagagggaccatcatctcttttgacccagtcactgtgtgtccctcagcacagctcacggtggcactttttgcctgtgacatgtcaccaggcttcctatctgacttgcagccactctggtctctgagcctcctgctactcagtgtgtcctgtggagcaggagctccagcatcacctgggagcttgtgagaaatgcagcctgggcctctccccagacccgctgcctgggaatctgcattggaacaagatcccctagtgattcctatgcgttcttaagttggagaggcactgaattcttgttaatgcctcagctaaataaaggcttgaggagtgagaacttgaaggaggcagcatgaagccgcggaaagaggtgttggcatctgatagaactgaaatcacatcttgccttttcccctcatccgctgcaagtacttgctgtgtgatcaattactcaacctctctgaacttcattttctctcagtagaaataatatgagctttggtcctcctccaagttgccatatctcagaaggaccagcacagggcaggattcagagcagctgctgtaagtgctgtttgccctccctctgcatacccgggggaggctgcagcagtgtatctggtgagtcagagaaggctgtggggagatttaaagggtctcttcccagcacaggaagcctggcacccagagcctaaggccagccaccctctctggagcatcacggatcatgtagttgaagcctccagctggtacagaagagaacagcaggtgcctgagaatgtgcggcactctgcaagctggggctctttgcaaagcagcagggggacctcagccaaggaggcgcacagggagggtaggctgctgttcgagggggcagatgctggcctccccgtggtggtgtcccctcctccacctgccagtgcccacactgaggccagcaacacactcttctgacagcagagtcatagggtgtggacatagaggcccatgtctcaagagaacagctggacatccacagagattaaggagctccctacaagtgtctggatgtggtgtaaaggagacctctgcacggaggctccagccgcactctgctattccctagttacctgatctcatcactttccctcccggaacctcaggcccctgcactgcaggggacagaccatccctgtggccttcctctcactgagttaattcaagacaaagctctcctttgtaaaccagaccctttccattcagtctatcacagtgtggcttactcggcaccccttttcagccccgctctcctcttcagttctcactgtggcttttttgttcttaattccttttcatggcccggcaaaaacggagttaattatattaaagacctgacttccctgtctagctccttaactccaggtcagcagataattgagagtcattgccctgatactgaatgaagagataaagttcccaggtttatttcaagtgacttatctgaagatgaggaaagagcaagaggttactaaaaaacatatctgtgaattgttgacagagacggtcacttctgcagaaactccagatgcccttgccaagtccaggtacaggtctaaactagcaaaccaaatgcattttctaggtttaaagtaaaggtgggtgctgatctccaggatgacatgcgaagatgccaaatcatccgagacatgattggaccggaaaagactttggtaaatatcctctcacaccactaagaagcagtagcctttgtccagggctaaatacaactcgtttcaagattaaagaacattgggaatttaaaaagttaattgtcagaggaagtacacttctgtggtcttgcagtaggcgagctcaaacaaaaataagcaaagggactaatagttttacgttttttaattctgcagaactagttaagtaagtttggggttaaggatcctttcttactaacacagatgtacctgagcaaacagttttcccattggtgctctggtgtgtcaatcatgtaatctcccctcctagctcctcaggtaggagggtgtcagggggccattactgaagaaatgttggaacttcagctgagataaatgtaaggatcagtcatttctgatttgtatttttataaaccagttcttacgtgtaaaatattttcataaagtcacagtaagatgtttttatgaggctttggaggcttttttgcataagttaaaatagaaattttgagttcttgacccaggatcactatttatacatgaattaatgctgctttttttttttaatgaagtcatctgtatccaaataacttatgataaaaattgattctgggctggccagatgctgtggctcatgcctgtaatcctagcactttgggatgcctaggtgagtggattgccggagctcaggagtacaagatcagcctggcaacatggaaaaaccccatctgtaccgaaaaatacaagaaaaaaaagtgttagcattatatggctcatgcctataatcctaacactttgggaggctgaagcaggtggatcacttgaggccaggagtttgggaccagcctgggctacatagcaagactctctctctaaaagaaagaagaaaaaaaattaaccaggtgtggtggtgcatgtctgtaatccctcctactttggaagatggggcaagaggatcactgagctcaggagttggaggctgcagtgagctacaataataccactgcactccagcatgggcaacagagtgagatccagcctcttaaaaaaaaaaaatccattctgagcatactgtcctctggttttcatagtgtcctgggagagagctcttatcacttagcacattctgtagagatgtccatttctccaagcacaataagatcagggatgaggggctgtcccttaagctgggcacagccatcacctggcttccaagaaggatagtggtacacagagagccagggcctaggagggagaggactggacttgaactcaccattcactagatttattgttcttaagcaagttactgaatttctctgcatgacagttttcttatttgtaaaatgggttaatatgaactgcctcatggggttattattattattttttgagatagggtctcactcagtcacccaggctagagtacagcagcatgatcacacctcactgcagccttgacctcccctggctcaggggatcctcccacctcaaccccctgagtagctgggactacaagtgagagccaccacacccagctaatttttgtattttttgtagagagaggattttgctatgttgcccagcctggtcttgaactcctgggctcaagaaatccacaggctgggccagatgcagtggctcatggctgtaatcccagcactttgggaggccgaggcgggcggatcacaaggtcaggagattgagaccatcctggctaacatggtgaaaccccgtctctactaaaaatacaaaaaaaaatagcctggtgtggtggtgggcgcctgtagtcccagctactcgggaggctgaggcaggagaatggcgtgaacctgggaggcagaggttgcagtgagccgagatagcgccactgcactccagccttggtgacagagcgagactctgtctcaaaaaaaaaaaaagaaaaagaaaagaaatccacgggcttcagcctcccagagtgttgagattacaggcatgagccaccatgcctggccagttattataaatattaaatggaacaaaatccataaagtgcctagtggagtaggtgtgccattatgggagagttaaggctacttattattgtgccagacacacagtgggcaatagtcaataaatgactattgaacaaacaatgttgattgtgcatgattcagaatgtgacaaaatggtttctacgaacagaaccaacactgcaagacacatgtatttgggtggcatctagatggagattggaccagagcccagggccagcgagcacttctcatggcccagcccagggcactgctggacatccagtggctcctcaagcgattcacggctcctcctaaagactgtacctggagccagagtccccgtctcagcagctgctctctggctctttttgttagggccgtgtgctgggcctcagcagaggcgttagggggtctcactcagctgttggtggcactgagtgacagcatttcctccctgggagccgcagccctgctgtgaggttggctcagggctgacctccctgtgaagagtctctttttgcagatgatggatgccaaccagcgctgggatgtgcctgaggcggtggagtggatgtccaagctggccaagttcaagccattgtggattgaggagccaacct

SEQ ID NO: 415 - DNA, 1640 bp, Homo sapiens
ttgttggggtcatttttatcaaagggaaagaaaagtgagactttaaccttaaaatggctgctcgcccagaagcaacttcataaatatctgtaaagtgcatgctaatccatcctgtaaacataccttcgaagtgcagacacatctccagtatatgcagcaaacaaaagatttatcactgactttacctgtgaagaaaagaaagtttaggcatccttaggagagagaaaacacatacaacgtccacctgtcactggcaagtgatttccatgtgctttgaacacttcagctgagtcacgtgcaaaaagtgatctcaaggacacttccatagccaaaagaacccacgtgtgtgatactttcttcttttaacagtggattgtgagggaaaattcaataataaagataagatacacaagggaaggaatggaataatatcacttggcagaagagaatggaattttgtgaaactcatacagttggggcaactgaaaattgtttagaagccttcccattttctatgtctcaatattgtgaggaagtctgtatgctgataaaattcacattattaaaaattaaatcatgctatataaatgtctaatccctgccaagaatcactatcctcaccaatcactggcttctttgcaaatcttaagagagaacattcagtgttaactgtcatcttaaactttacttcactggaaagacagccttcagttcaatgcccaggtggtacaaattgggtcattctcagaacttatgacactgctgtgtttaaaagtttctcaactccaaaatattaagtcacctctattaagtgctccaagatttcaaagtgtatctacttttgacagttacccactttccttttcttatagttaagaggaaaagtctagttatttgaaaagccattggattttggtctgctttcataaagactttatccatccctatctatgagaaattaaactattgaccatagaatatttgtaaatacttcataaattccccattttgtcttacactttgcaacttcaacattcatattgatgactcaactgatactggactcaatggtagaaaacaagtttaactggggaatggaaagtaacccagctctccaccaacaaagccacagcctggaactgtgcttcaagatcttaacccggacattctccctttccagtatggcttcccccttccaaaacccatgaaccttccaaattaactggaactgatcattgctgcagttctctaattcatcattttcaaagtgtaatttgcagaaactagtccgtaagatggcccatgaaaataaggatcctgtgtttgtatatgatcttaaaatattcaatccccctcttggagattcatgagcatatgaaagactctgtaaaggtctgcagtacaggaacttaactagctgagcacacccccaaaatactactattactatttgtgttgataccacttcaaaaaactttccacttagtcctttagcttcccttccagccatccttttctattcctgcccagagtccagaacagttttcttaatggggaatgggggtggaacaaagaactgaagaacatcacccagaatgttctaaaaacatacataaacatctctcccatttcttgttgtc

SEQ ID NO: 416 - DNA, 3633 bp, Homo sapiens
gcacatcaaaaagcttatccaccacgatcaagtcggcttcatccctgggatgcaaggctggttcaacatatgcaaatcgatacacgtaatccatcacataaacagaaccaatgacaaaaaccacaattatctcaatagatgcagaaaaggcctttgacaaaatccaacacaccttcatgctaaaaactctcaataaactaggtattgatggaatgtatctcaaaataataagagctatttatgacaaacccacagccaatatcatactgaatgggcaaaaaactggaagcattccctttgaaaattggcacaagacaaggatgccctctgtgaccactcctattcaacatagtattggcagttctggctaggacaatcaggcaagggaaagaaataaaggggctgggcacagtggctcatgcctgtaatcccagcactttgggaggccaaggcaggcagattacctgaggtcaggagttcgagagcagcctggccaacatggtgaaaccccatctctactaaaaatacaaaaattagctggctgtggtgggcacacgcctgtaatcccagctactcgggaggctgaggcaggagaattgcttgagcctgggagacagaggttgcagtgagctgaggtcttgccactgcactccagcctggctgacagagcgagactcttgtctcagaaaagaaagaaagaaaggtattcaaataggaagagaggaagtcaaattgtctctgtttgcagatgacatgattgtatatttacaaaaccccatcatctcggcccaaaatctccttaagctgataagcaacttcagcaaagtctcaagatacaaaatcaatgtgcaaaaatcacaggcattcctatacaccaataatagacaaagagagagccaaatcatgagtgaactcccattcacaactgctacaaagagaataaaatacctaggaattcaacttacaagggatgtgaaggacctcttcaaggagaactacaaaccactgctgaaggaaataaagagaggacacaaacaaatggaaaaacattccatgctcgtggctagaaagaatcaatatcatgaaaatggccatacaacccaaagtaatttataggttctatgctatccccataaagctaccattgactttcttcacagaattagaaaaaaaataccttaaatttcatatataaccaaaaaagagcccacatagccaagacgatcctaagcaaaaagaagaaagctggaggcatcacgctacctgacttcaaactatactacaaggctacagtaatcaaaacagtatggtactgataccaaaatagatacacagagcaatggaaaagaactgaggcctcagaaataacagcacacatctacaaccatctgatctttgacaaacctgacaaaaacaagcaatggggaaaggtattgggaaaactggctagccatatgcagaaaactgaacctggaccccttcctttcaccttatacaaaaattaactcaagatggattaaagacttaaacataagacctaaaaccataaaaaccctagaagaaaacctaggcaataccattcaggacataggcatgggcaaagacttcatgaccaaaacaccaaaagcaatggcaacaaaagccaaaattgataaatgggatctaattaaactaaagagcttctgcacagcaaaagaaactatcatcagggcgaacaggcaacctacagaatgggagaaaatttttgcgatctatccatctgacaaagggctaatatccagaatctacaaggaagttaagcaaatttacaacaacaaaaaaaccccatcaaaaagtgggtgaaggatgtgaacagacacttctcaaaagaagacatttatgcagccaacaaacatgtgaaaaaaatatcatcatcactggtcattagagaaatgcaaatcaaaaccacaatgagataccatctcacaccagttagaatggcgatcactaaaaaggaaacaatagatgctggagaggatgtggagaaataggaacgcttttacactgttagtgggagtgtaaattagttcaaccattgtggaagacagtgtggtgattcctcaaggatctagaaccagaaataccatttgatccagcaatcccattactgggtatatacccaaaagattataaatcattctactataaagacacatgcacatgtatgtttattgtggcactgttcacaatagaaaagacttggaactaacccaaatgaccatcgataatagactggataaagaaaatgtggcacatatacaccatggaatactatgcaatcataaaaaaggatgagttcatgtcctttgcagggacatgggtgaagctggaaaccatcattctcagcaaactaacacaagaacagaaaaccaaacacttcatgttctccctcgtaagtgggagtggaacagtgagaacacatggacacagggaggggaacatcacacaccagggcctgtttgggggtcagggtaagggagggatcgcattagaagaaatacctaatgtagatgatgggttgatgggtgcagcaaaccaccatggcacttatatacccatgtaacaaacctgcatgttctgcacatgtatcccagaacttaaagtgtaatttaaaaattttttttttaaaatccatgaggataaaattccaattctttcttcccaaatgcaaaaaaaaaattgttttgttcatacagtgtattgactaatggtcaaatcaacctgaaaatttctaaataagacaccattcttagataagaaacaggatatgggagacagaattacctatctagtagaaacaaggtttattgcctttataagatatcatagcaggttcaagaatgtcttagtaggttgaaatattatcatcacttgaatattacagtcctgcataataaaatactgacatatttagaaggtaacataagtgctcacctgtccttggggaaagggtttactttgcaggcttccagcaaaaatttaacaacttcaacatgacctataccgtcccacccccaaaaaaagagcagattttagtactaagtagaaattaaatctggaaagaaaatagataggagtagttcctgtattaccctctgcagcagctacatggagtgctgttctagaatcatagtcccgctgttccatgtccatagctgacaaagcaaatctgaaaatgtgtaagcacagctatttattatatataaagcaaatttaattcacactggtaacattcactccatcagttcatttaaggccctgtcaggtgccatccttcatcaagctcattaatgggaactaccgaccttattaaccagtacacaggtgttttgggtagatgccacttcacctctcttcctcagctttgcttttttttaggtaagattaaatgttaaccatctctcacagaattaaactttattacattattgttcgcaacttaagaattatggcacaactgtgtaccaaggtttatgtctcataagggcaagaaactaatccctatagtaaagttgtatgttttactaagactcccattcttaaacatttcacagtctactagtacttgtcagacttcaaaacaagggggggaag

SEQ ID NO: 417 - DNA, 605 bp, Homo sapiens
aatggggtcaactctgaattctcaattccctttttgctcttggaccacagaatactgactggctattacagattattctccatatttccacctggtctctcattactgcttgacaatttttttttcttgttggttcccgccatactttcttcaggcctttaataccagtggagacccctaaaaacagacagaagatcctaactacaactttgctaaaaagataaaaactgttttcatcgctcaaagtaaaaagcttcctcatttttgagactactttttatctattccttcaaacacttatcctctagatgccctgttcttgttccctcactgatcccctttgtttctagcatctttaacttttcctctttcattggttctctcagtttaccttaaaacagacacaatttcatcctatttttaaaaagcaacacttgaccctattgttctcccttcagcgcttatttcctgaaagtatatttttaattccctgaaaattaccttcacactcattgttacctctaaacagcgctctccaaagctccagcagcttcctaagccctgattccttcagatccccccagcaccctccaccctctcacgac

SEQ ID NO: 418 - DNA, 5690 bp, Homo sapiens
gttctctgttagctcagtgtctttccttacatcaataggtttttttttttttttttggcctgaggaagtactgaccatgcccacagccaccggctgagcaaagaagctcatttcatgtgagttctaaggaatgagaaacaattttgatgaatttaagcagaaaatgaatttctgggaacttttttgggggcgggggggtggggaattcagccacactccagaaagccaggagtcgacagttttggaagcctctctcaggattgagattctaggatgagattggcttactgctatcttgtgtcatgtacccactttttggccagactacactgggaagaaggtagtcctctaaagcaaaatctgagtgccactaaatggggagatggggctgttaagctgtccaaatcaacaagggtcatataaatggccttaaactttggggttgctttctgcaaaaagttgctgtgactcatgccatagacaaggttgagtgcctggacccaaaggcaatactgtaatgtaaagacatttatagtactaggcaaacagcaccccaggtactccaggccctcctggctggagagggctgtggcaatagaaaattagtgccaactgcagtgagtcagcctaggttaaatagagagtgtaagagtgctggacaggaacctccaccctcatgtcacatttcttcaatgtgacccttctggcccctctcctcctgacagcggaacaatgactgccccgataggtgaggctggaggaagaatcagtcctgtccttggcaagctcttcactatgacagtaaaggctctctgcctgctgccaaggcctgtgactttctaacctggcctcacgctgggtaagcttaaggtagaggtgcaggattagcaagcccacctggctaccaggccgacagctacatcctccaactgaccctgatcaacgaagagggattcatgtgtctgtctcagttggttccaaatgaaaccagggagcaggggagttaggaatcgaacaccagtcatgcctactggctctctgctcgagagccaataccctgtgccctccactcatctggatttacaggaactgtcatagtgttcagtattgggtggtgataagcccattggattgtccccttggggggatgagctaggggtgcaaggaacacctgatgagtagataagtggagctcatggtatttcctgaaagatgctaatctatttgccaaacttggtcttgaatgtactgggggcttcaaggtatgggtatatttttcttgtgtccttgcagttagcccccatgtcttatgtgtgtcctgaaaaaataagagcctgcccaagactttgggcctcttgacagaattaaccacttttatacatctgagttctcttggtaagttctttagcagtgttcaaagtctactagctcgcattagtttctgttgctgccaacagatctgaactaatgctaacagatccccctgagggattcttgatgggctgagcagctggctggagctagtactgactgacattcattgtgatgagggcagctttctggtacaggattctaagctctatgttttctatacattttcatctgtacttgcacctcactttacacaagaggaaactatgcaaagttagctggatcgctcaaggtcacttaggtaagttggcaagtccatgcttcccactcagctcctcaggtcagcaagtctacttctctgcctattttgtatactctctttaatatgtgcctagctttggaaagtctagaatgggtccctggtgcctttttactttgaagaaatcagtttctgcctctttttggaaaagaaaacaaagtgcaattgttttttactggaaagttacccaatagcatgaggtgaacaggacgtagttaggccttcctgtaaacagaaaatcatatcaaaacactatcttcccatctgtttttcaatgcctgctactttttgtagatatttcatttcaggagagcagcagttaaacccgtggattttgtagttaggaacctgggttcaaaccctcttccactaattggctatgtctctggacaagttttttttttttttttttttttaaaccctttctgaactttcactttctatgtctacctcaaagaattgttgtgaggcttgagataatgcatttgtaaagggtctgccagataggaagatgctagttatggatttacaaggttgttaaggctgtaagagtctaaaacctacagtgaatcacaatgcatttacccccactgacttggacataagtgaaaactagccagaagtctctttttcaaattacttacaggttattcaatataaaatttttgtaatggataatcttatttatctaaactaaagcttcctgtttatacacactcctgttattctgggataagataaatgaccacagtaccttaatttctaggtgggtgcctgtgatggttcattgtaggtaaggacattttctctttttcagcagctgtgtaggtccagagcctctgggagaggaggggggtagcatgcacccagcaggggactgaactgggaaactcaaggttctttttactgtggggtagtgagctgcctttctgtgatcggtttccctagggatgttgctgttcccctccttgctattcgcagctacatacaacgtggccaaccccagtaggctgatcctatatatgatcagtgctggtgctgactctcaatagccccacccaagctggctataggtttacagatacattaattaggcaacctaaaatattgatgctggtgttggtgtgacataatgctatggccagaactgaaacttagagttataattcatgtattagggttctccagagggacagaattagtaggatatatgtatatatgaaagggaggttattagggagaactggctcccacagttagaaggcgaagtcgcacaataggccgtctgcaagctgggttagagagaagccagtagtggctcagcctgagttcaaaaacctcaaaactggggaagctgacagtgcagccagccttcagtctgtggccaaaggcccaagagcccctggcaaccaacccactggtgcaagtcctagattccaaaggctgaagaacctggagtctgatgtccaagagcaggaagagtggaagaaagccagaagactcagcaaacaaggtagacagtgtctaccaccacagtggccataccaaagaggctaccgattccttcctgctacctggatccctgaagttgccctggtctctgcaccttctaaacctagttcttaagagctttccattacatgagctgtctcaaagccctccaataaattctcagtgtaagcttctgttgcttgtggacagaaaattctgacagacctaccctataagtgttactgtcaggataacatgagaacgcacaacagtaagtggtcactaagtgttagctacggttattttgcccaaggtagcatggctagttgatgccggttgatggggcttaaacccagctccctcatcttccaggcctctgtactccctattccactaaactacctctcaggtttatttttttaaattcttactctgcaagtacataggaccacatttacctgggaaaacaagaataaaggctgctctgcattttttagaaacttttttgaaagggagatgggaatgcctgcacccccaagtccagaccaacacaatggttaattgagatgaataataaaggaaagactgttctgggcttcccagaatagcttggtccttaaattgtggcacaaacaacctcctgtcagagccagcctcctgccaggaagaggggtaggagactagaggccgtgtgtgcagccttgccctgaaggctagggtgacaatttggaggctgtccaaacaccctggcctctagagctggcctgtctatttgaaatgccggctctgatgctaatcggcgaccctcaggcaagttacttaaccttacatgcctcagttttctcatctggaaaatgagaaccctaggtttagggttgttagaaaagttaaatgagttaagacaagtgcctgggacacagtagcctcttgtgtgtgtttatcattatgtcctcagcaggtcgtagaagcagcttctcaggtgtgaggctggcgcgattatctggagtgggttgggttttctaggatggaccccctgctgcattttcctcattcatccaccagggcttaatggggaatcaaggaatccatgtgtaactgtataataactgtagccacactccaatgaccacctactagttgtccctggcactgcttatacatatgtccatcaaatcaatcctatgaagtagatactgtcttcattttatagatcagagacaattggggttcagagagctgatgtgattttcccagggtcacagagagtcccagattcaggcacaactcttgtattccaagacacaaccactacatgtccaaaggctgcccagagccaccgggcacggcaaattgtgacatatccctaaagaggctgagcacctggtcaggatctgatggctgacagtgtgtccagatgcagagctggagtgggggaggggaaggggggctccttgggacagagaaggctttctgtgctttctctgaagggagcagtctgaggaccaagggaacccggcaaacagcacctcaggtactccaggccctcctggctggagagggctgtggcaatggaaaattagtgccaactgcaatgagtcagcctcggttaaatagagagtgaagaatgctggacaggaacctccaccctcatgtcacatttcttcagtgtgacccttctggcccctctcctcctgacagcggaacaatgactgccccgataggtgaggctggaggaagaatcagtcctgtccttggcaagctcttcactatgacagtaaaggctctctgcctgctgccaaggcctgtgactttctaacctggcctcacgctgggtaagcttaaggtagaggtgcaggattagcaagcccacctggctaccaggccgacagctacatctttcaactgaccctgatcaacgaagagggacttgtgtctctcagttggttccaaatgaaaccagggagcaggggcgttaggaagctccaacaggatggtacttaatggggcatttgagtggagaggtaggtgacatagtgctttggagcccagggagggaaaggttctgctgaagttgaattcaagactgttctttcatcacaaacttgagtttcctggacatttgtttgcagaaacaaccgtagggttttgccttaacctcgtgggtttattattacctcatagggactttgcctcctgacagcagtttatgggtgttcattgtggcacttgagttttcttgcatgcttgttagagaaaccaagtttgtcatcaacttcttatttaaccccctggctataacttcatggattatgttataattaagccatccagagtaaaatctgtttagattatcttggagtaagggggaaaaaatctgtaattttttctcctcaactagatatatacataaaaaatgattgtattgcttcatttaaaaaatataacgcaaaatctcttttccttctaagggcctttaatatgtaataacaagagctaatgttgaacacaa

SEQ ID NO: 419 - DNA, 5689 bp, Homo sapiens
gttctctgttagctcagtgtctttccttacatcaataggtttttttttttttttttggcctgaggaagtactgaccatgcccacagccaccggctgagcaaagaagctcatttcatgtgagttctaaggaatgagaaacaattttgatgaatttaagcagaaaatgaatttctgggaacttttttgggggcgggggggtggggaattcagccacactccagaaagccaggagtcgacagttttggaagcctctctcaggattgagattctaggatgagattggcttactgctatcttgtgtcatgtacccactttttggccagactacactgggaagaaggtagtcctctaaagcaaaatctgagtgccactaaatggggagatggggctgttaagctgtccaaatcaacaagggtcatataaatggccttaaactttggggttgctttctgcaaaaagttgctgtgactcatgccatagacaaggttgagtgcctggacccaaaggcaatactgtaatgtaaagacatttatagtactaggcaaacagcaccccaggtactccaggccctcctggctggagagggctgtggcaatagaaaattagtgccaactgcagtgagtcagcctaggttaaatagagagtgtaagagtgctggacaggaacctccaccctcatgtcacatttcttcaatgtgacccttctggcccctctcctcctgacagcggaacaatgactgccccgataggtgaggctggaggaagaatcagtcctgtccttggcaagctcttcactatgacagtaaaggctctctgcctgctgccaaggcctgtgactttctaacctggcctcacgctgggtaagcttaaggtagaggtgcaggattagcaagcccacctggctaccaggccgacagctacatcctccaactgaccctgatcaacgaagagggattcatgtgtctgtctcagttggttccaaatgaaaccagggagcaggggagttaggaatcgaacaccagtcatgcctactggctctctgctcgagagccaataccctgtgccctccactcatctggatttacaggaactgtcatagtgttcagtattgggtggtgataagcccattggattgtccccttggggggatgagctaggggtgcaaggaacacctgatgagtagataagtggagctcatggtatttcctgaaagatgctaatctatttgccaaacttggtcttgaatgtactgggggcttcaaggtatgggtatatttttcttgtgtccttgcagttagcccccatgtcttatgtgtgtcctgaaaaaataagagcctgcccaagactttgggcctcttgacagaattaaccacttttatacatctgagttctcttggtaagttctttagcagtgttcaaagtctactagctcgcattagtttctgttgctgccaacagatctgaactaatgctaacagatccccctgagggattcttgatgggctgagcagctggctggagctagtactgactgacattcattgtgatgagggcagctttctggtacaggattctaagctctatgttttatatacattttcatctgtacttgcacctcactttacacaagaggaaactatgcaaagttagctggatcgctcaaggtcacttaggtaagttggcaagtccatgcttcccactcagctcctcaggtcagcaagtctacttctctgcctattttgtatactctctttaatatgtgcctagctttggaaagtctagaatgggtccctggtgcctttttactttgaagaaatcagtttctgcctctttttggaaaagaaaacaaagtgcaattgttttttactggaaagttacccaatagcatgaggtgaacaggacgtagttaggccttcctgtaaacagaaaatcatatcaaaacactatcttcccatctgtttctcaatgcctgctacttcttgtagatatttcatttcaggagagcagcagttaaacccgtggattttgtagttaggaacctgggttcaaaccctcttccactaattggctatgtctctggacaagtttttttttttttttttttttaaaccctttctgaactttcactttctatgtctacctcaaagaattgttgtgaggcttgagataatgcatttgtaaagggtctgccagataggaagatgctagttatggatttacaaggttgttaaggctgtaagagtctaaaacctacagtgaatcacaatgcatttacccccactgacttggacataagtgaaaactagccagaagtctctttttcaaattacttacaggttattcaatataaaatttttgtaatggataatcttatttatctaaactaaagcttcctgtttatacacactcctgttattctgggataagataaatgaccacagtaccttaatttctaggtgggtgcctgtgatggttcattgtaggtaaggacattttctctttttcagcagctgtgtaggtccagagcctctgggagaggaggggggtagcatgcacccagcaggggactgaactgggaaactcaaggttctttttactgtggggtagtgagctgcctttctgtgatcggtttccctagggatgttgctgttcccctccttgctattcgcagctacatacaacgtggccaaccccagtaggctgatcctatatatgatcagtgctggtgctgactctcaatagccccacccaagctggctataggtttacagatacattaattaggcaacctaaaatattgatgctggtgttggtgtgacataatgctatggccagaactgaaacttagagttataattcatgtattagggttctccagagggacagaattagtaggatatatgtatatatgaaagggaggttattagggagaactggctcccacagttagaaggcgaagtcgcacaataggccgtctgcaagctgggttagagagaagccagtagtggctcagcctgagttcaaaaacctcaaaactggggaagctgacagtgcagccagccttcagtctgtggccaaaggcccaagagcccctggcaaccaacccactggtgcaagtcctagattccaaaggctgaagaacctggagtctgatgtccaagagcaggaagagtggaagaaagccagaagactcagcaaacaaggtagacagtgtctaccaccatagtgtccataccaaagaggctaccgattccttcctgctacctggatccctgaagttgccctggtctctgcaccttctaaacctagttcttaagagctttccattacatgagctgtctcaaagccctccaataaattctcagtgtaagcttctgttgcttgtggacagaaaattctgacagacctaccctataagtgttactgtcaggataacatgagaacgcacaacagtaagtggtcactaagtgttagctacggttattttgcccaaggtagcatggctagttgatgccggttgatggggcttaaacccagctccctcatcttccaggcctctgtactccctattccactaaactacctctcaggtttatttttttaaattcttactctgcaagtacataggaccacatttacctgggaaaacaagaataaaggctgctctgcattttttagaaacttttttgaaagggagatgggaatgcctgcacccccaagtccagaccaacacaatggttaattgagatgaataataaaggaaagactgttctgggcttcccagaatagcttggtccttaaattgtggcacaaacaacctcctgtcagagccagcctcctgccaggaagaggggtaggagactagaggccgtgtgtgcagccttgccctgaaggctagggtgacaatttggaggctgtccaaacaccctggcctctagagctggcctgtctatttgaaatgccggctctgatgctaatcggcgaccctcaggcaagttacttaaccttacatgcctcagttttctcatctggaaaatgagaaccctaggtttagggttgttagaaaagttaaatgagttaagacaagtgcctgggacacagtagcctcttgtgtgtgtttatcattatgtcctcagcaggtcgtagaagcagcttctcaggtgtgagcgtggcgcgattatctggagtgggttgggttttctaggatggaccccctgctgcattttcctcattcatccaccagggcttaatggggaatcaaggaatccatgtgtaactgtataataactgtagccacactccaatgaccacctactagttgtccctggcactgcttatacatatgtccatcaaatcaatcctatgaagtagatactgtcttcattttatagatcagagacaattggggttcagagagctgatgtgattttcccagggtcacagagagtcccagattcaggcacaactcttgtattccaagacacaaccactacatgtccaaaggctgcccagagccaccgggcacggcaaattgtgacatatccctaaagaggctgagcacctggtcaggatctgatggctgacagtgtgtccagatgcagagctggagtgggggaggggaaggggggctccttgggacagagaaggctttctgtgctttctctgaagggagcagtctgaggaccaagggaacccggcaaacagcacctcaggtactccaggccctcctggctggagagggctgtggcaatggaaaattagtgccaactgcaatgagtcagcctcggttaaatagagagtgaagaatgctggacaggaacctccaccctcatgtcacatttcttcagtgtgacccttctggcccctctcctcctgacagcggaacaatgactgccccgataggtgaggctggaggaagaatcagtcctgtccttggcaagctcttcactatgacagtaaaggctctctgcctgctgccaaggcctgtgactttctaacctggcctcacgctgggtaagcttaaggtagaggtgcaggattagcaagcccacctggctaccaggccgacagctacatctttcaactgaccctgatcaacgaagagggacttgtgtctctcagttggttccaaatgaaaccagggagcaggggcgttaggaagctccaacaggatggtacttaatggggcatttgagtggagaggtaggtgacatagtgctttggagcccagggagggaaaggttctgctgaagttgaattcaagactgttctttcatcacaaacttgagtttcctggacatttgtttgcagaaacaaccgtagggttttgccttaacctcgtgggtttattattacctcatagggactttgcctcctgacagcagtttatgggtgttcattgtggcacttgagttttcttgcatacttgttagagaaaccaagtttgtcatcaacttcttatttaaccccctggctataacttcatggattatgttataattaagccatccagagtaaaatctgtttagattatcttggagtaagggggaaaaaatctgtaattttttctcctcaactagatatatacataaaaaatgattgtattgcttcatttaaaaaatataacgcaaaatctcttttccttctaagggcctttaatatgtaataacaagagctaatgttgaacacaa

SEQ ID NO: 420 - DNA, 2271 bp, Homo sapiens
tttaacactttttaaaaattaatggactgggtttttcaggtttttttctgaccattcttgagcatatatcttatacatagctttggctgggcatggtggctcacccctataattctatcactttgggaggctgaagcaggaggaccacttgagcccaggagttcaagaccagatgaccgggcaagaaagtgagaccttatctctctaaaaaaaaaaaagaaaagaaaaggaaaaaatccccaagtaacttcatagcgtaaattctaaaagtggaattgctggatcaaagggggcatgtgtttaaaatcttggcagatattaccaaatttccctcttaacagtataaatgcctgttcctcctccgtcccacccccataactatactggctctgatgagaccttggttttctgtaaaagctctatttagaggtgtatcattatttacttaattgttctcctttacaacccacctgggatgagcatcttgcctagaagtctctacttgcacaggatacatacgaaatagaattgaggattcaaaagcagatacagaactcttcccacttactttcttacccttgtgtgtgtctccccacagggttacaagtgtataacaagtgttggaagtttgagcattgcaatttcaacgacgtcacaacccgcttgagggaaaatgagctaacgtactactgctgcaagaaggacctgtgtaactttaacgaacagcttgaaaatggtgggacatccttatcagagaaaacagttcttctgctggtgactccatttctggcagcagcctggagccttcatccctaagtcaacaccaggagagcttctcccaaactccccgttcctgcgtagtccgctttctcttgctgccacattctaaaggcttgatattttccaaatggatcctgttgggaaagaataaaattagcttgagcaacctggctaagatagaggggctctgggagactttgaagaccagtcctgtttgcagggaagccccacttgaaggaagaagtctaagagtgaagtaggtgtgacttgaactagattgcatgcttcctcctttgctcttgggaagaccagctttgcagtgacagcttgagtgggttctctgcagccctcagattatttttcctctggctccttggatgtagtcagttagcatcattagtacatctttggagggtggggcaggagtatatgagcatcctctctcacatggaacgctttcataaacttcagggatcccgtgttgccatggaggcatgccaaatgttccatatgtgggtgtcagtcagggacaacaagatccttaatgcagagctagaggacttctggcagggaagtggggaagtgttccagatagcagggcatgaaaacttagagaggtacaagtggctgaaaatcgagtttttcctctgtctttaaattttatatgggctttgttatcttccactggaaaagtgtaatagcatacatcaatggtgtgttaaagctatttccttgccttttttttattggaatggtaggatatcttggctttgccacacacagttacagagtgaacactctactacatgtgactggcagtattaagtgtgcttattttaaatgttactggtagaaaggcagttcaggtatgtgtgtatatagtatgaatgcagtggggacaccctttgtggttacagtttgagacttccaaaggtcatccttaataacaacagatctgcaggggtatgttttaccatctgcatccagcctcctgctaactcctagctgactcagcatagattgtataaaatacctttgtaacggctcttagcacactcacagatgtttgaggctttcagaagctcttctaaaaaatgatacacacctttcacaagggcaaactttttccttttccctgtgtattctagtgaatgaatctcaagattcagtagacctaatgacatttgtattttatgatcttggctgtatttaatggcataggctgacttttgcagatggaggaatttcttgattaatgttgaaaaaaaacccttgattatactctgttggacaaaccgagtgcaatgaatgatgcttttctgaaaatgaaatataacaagtgggtgaatgtggttatggccgaaaaggatatgcagtatgcttaatggtagcaactgaaagaagacatcctgagcagtgccagctttcttctgttgatgccgttccctgaacataggaaaatagaaacttgcttatcaaaacttagcatta

SEQ ID NO: 421 - DNA, 14024 bp, Homo sapiens
gttattcccacagtgtggtagtacacactggggcttatagggactgagcctactcaagggtatatggtgctgtgggtcagagctggggcatggcccagggattcagtgtgccttgactccccctgtaaatgttcctctcagaagccttcttggccttccagcccttggtttttgagacaaccagcagtcatttgttcgttcctgacattccttcctgtcccttccttccaggttctgtggacaatcacaatgggaatccaaggagggtctgtcctgttcgggctgctgctcgtcctggctgtcttctgccattcaggtgagtgctccagtctcaggacatggatctaggctgccttggccatgaactcccttcttaagcctcagtttcagccccagctgctcctccaggcctggctttggttcttttgccttccagtgttacaggtctggggttgtatgacagctccttcctatgttatgaccttgtcctcagtggggcatcgtcctgagttacagcccgtcctgagttacagcgtggcttttggcaggggtgggtcaacaatcggcggctgaagtttcactcctgtcaccataagctgcttggggacaccaatggataccattcttagagtgctgtgcaagtccctttggggtccactctgcttagagccatctgagctcagtccttctgctctgaggctcctcctgtgttttaatgatgatgatggtcatagtgacagcagcagcagctaactaaccctgaagcatttatgtgccagtcactactctaagcattttacgtgtatttgcttatttaatcctcatgccaacctgatggagttggtggtatttttatccttgttttacaagcaacaagattgaggcctccccaaaattaataacttgtcaaataacacacagaagtggtacacgggaatgtgaacacacagtctggcaacagagtccctgctcttccctcctgctccaggccatctgtcactgggccaccccctctcctcagccacccctcccctggttgctggaggaaattgtgtgcttctgagtcaacttctataacagtggaaacacacatgcttcattgtaaagatcaagtgtggttgtctgcctgtgtcatgttggtataatatcttggccactgctggttttttgttttttataaatatggttggtggggggagcagaaaagaaagtggcaatacagtgagcaatttaaaaaaagatttccacaccactgtagcatgtcttagaatattaacagcaaccatatattcactgtttattgtttactggggactgtgccagagcctgtctcatttaaatccgtccagccattccgggaggtcggtactgttacctcccatattacagctgaggaaatgaaggcaaagtagtaacttggcgccaggacacactttaatatgttctccctttctgagcagaaagagaagtcatggcaccccttcttccccaccttccgtgattctagccagggtgcactgtaatgtggttcacctgtgttaaaacactatattttttctataattattttttatttattcatttttcttggttccttctttttttctgtctctgctgcttaagttggaatattttctagaattttaatagcccagtgacatcctacttccagcagtctgcatttgtttatggagcaagcttgggaccatcagcttctctgtgacaagtcttggggtgcacttcagccctttctcagagaattgagatgtgaagctcacatgcccacagatgagaggccttctttgctgctgcccaaaagggtctcaggaccctgcaggggaactttcctctgagctctgcctcttatggcccaggggaaacctcgtctaccctggcttagtggctaaaatatcaaaccattgtccactgacctattgcttgtttttttttgtttgtttttttcagggggatggagtctcactctgtcgcccaggctggagcgcagtggcgcgatctcggctcactgcaacctccgtgtcccaggttccagcgattctcctgcctcagtcttctgagtagctgggattacaggagcatgccactatgcctggctaatttttgtatttttttttatttactttttaatttttgtatttttagtagaggcgggctttcaccatgttggccaggctggtctggaattcctgacctcaaatgatccacctacctcagcctgccaaagtgttgggattacaggcgtgagccattgcacctggccctgttgcttgtttttgacctcagtttccaccataatctagagtttccttctcttcccactcaggtcaattagaagaacatcatggttaaccaagcttggattttagaactgacagcctgagtttgagctcagctcggtcacttagtagctgtgtggctttgaacaatttagttaacatcttagtcttagttttctcttgcaaggtggggatgaagataattgagcctagttctcttaacaatcctatgaagagcttagcacatagatgcacatatatttgaacactgaatgaacatgtttgccatgaatatttttgcccacagacgttccaaccatgggttttagcctttccttctaaagctttcttaagaggccaaatgagcccgggatctagccaccacaaaaatccatgtctacaggtaaccttttaaaatggccctcaaacatggccagtctcaagaacaacacccttcatcttagactcttttcatttcatgcgtgtgaatacatgtctggcacaaggaagggaccaaagaaaaattgcatctttgcgccttctccttgtggcttccctctcacacgggcatgacagccacaggctgacagtgggggagaacaaacaaagcctggtggatggggccctgcccacaggccccagggctgccgccagctctgctgctttgtagccaggtgtccttgtgtgagtcacatcacctctccagacatctgtcttgtcatctgcaaaaaagttggggaggaggttggtttttattttattttattttatttattttttagacatggtctcgctctgtctcccaggctggagtgcagtggtgcaagcttggctcactgcaccctccacctcccaagctcaaatgattctcatgccttagcctcctgaatagctgggattacaggcatgtaccaccatgcccggctaatctttgtatattttgtagaggcgaggtttcaccatgttggccagggtggtctcaaactcctggctacaagtgatccacccacctcggcctcccaaagtgctgggattgtaggtgtgagccgccacacctggcctagtttgttgttgttttttaaaactaatatttcaaggcattaatctgtaaccttcacaagtcagaggatcctctattgggtaggatttcacacctgtgagggcagacatggccatttcagatgctctagagaactgggttcctgtgtgtgctcagaaagtgaggacccaccttgcttccactggactttccactgaaaaatctatttccatggtgataaacctagccttcagccttagaactagaagtcagctgttgggctctaaaacccacacttggtttaaccatgacattcttttgtgagattttacgtgtttcatctttgaaaatgtcttttcacagaggtaggtacttccaaatactgattacatggtagaagtcatatggcatgaagatagtttatctctgatgatggaaaagggggtatccatacaaaccaggaagatttccttccaactcttgcttcctcagtctctccccatcacacgtgtggactgtaactcatctttttgttgtcactgttgttacaaaaatggagaaggaaaaataacccagcaaaaactgacagctagcaaggatgagtcttaagaattgactgggagcaataattgtttttcaaactagggaactggaggcaatttgcttctgatgtaagatgaccctcacgttgtgtctgctggtacccagctgtcctatgcccatgggtttaaagtgcacagctgttgtcttgtctttgacagtgtgtactcctggcattcggtcagtcccttagaagggagtagttcagtaatgataccctgtcccagaggttaccaaactttttctgtacaggaccagatagcaatttttttttttttttaaacagagttttgctctgtcacccaagctggagtgcagtggtgcaattgtggctcactgcaacctctgcctcctgggttcaagcgattctcctgcctcagcctcccaagtagctgggattataggtgtgcaccaccatgcctggctaatttttttatttttagtagagatggggtttcgctatgttggccaggctggtgtcaaactcctgacctcaggtgatccaccctcctcggcttccctaagtgctgggattacaggcgtgagccactgcgcctggcccagatagtaaatattttaagctttgcagaccaagaggcaaaatcaagggtattatgagacttacctcaataataagaaacaaaattttcacagatttttttattgacaaaattcataacataattattgagtccagcataataatacacatctactaatgaggggaatagaattctttttagggggataaccatttgcttaattggggttcaaaattagtgttccctcgcatcaaatcaattgcagatgttcatctattaatactaatctgtgatgacattttacatatttcattttgaaaatgtattttcacgcagataggtattgccagacattgatcatcaacccacgaggatgtgatttaattgggcatattcattgcttggaagacacttatagaattctgtttgtttctcggtaatttcttcttaacacatcattacattgcagactaatctccttccagttgcaggttaggaggaagcttctcaattgcacagttagatggatattcaaatgtggatatttcctttgtgcttgcatcagggtccaaaaaatgttgctggaactgtagtttgaatttggaaagatataactgctatacatttgtgcgggagtggaagtataccacaagttgctgactttgggcccatattaatggagatggtgggctgccaggggacaagtcagtgctgctttaagagatcctgactttcttcctgattctaggtcatagcctgcagtgctacaactgtcctaacccaactgctgactgcaaaacagccgtcaattgttcatctgattttgatgcgtgtctcattaccaaagctggtaagagcctcccctgtctgtctcctaaatgtaatggggtaataagtgcctgggaaaaaaattgtgccactgtaatcctcattaggcttgcatcaagtaatagctaccatttattagcgtcaggtgtgtattgggctaagcactttcttcatacattttaaatttaatgttttgcacttctaagggtgatcttttatttccatttgataaatgtggaaatggaggttcagattaagcaagaaattatggttaagtaaccgactcaggaattgaacatggaagtccatctgattccaaagcttgtgctcttttacagcagccctgtgctgcctcccagaccttggagaacctactgtgtgcccagcagagggttaggagctagggatgcaaagataaagaaaggacacatacaattaaaattatgacaaaggcctgtttggctgtcctaaatgtcattatatatgcctctgtctcattccatggggtatctggtatattcagagtcctgaggagactcaagctgagctcaaaggacacgtaggaggtaagagggctaagaagggaagggtgtgcctgggaggggcaacagcaggtgccagggctcggtagcctcagagcaaggtgctcatgaatttggggatgggcaatgctaacatgcacaagtcctgtccagtctgcattttccaaatttgttagactacagaatattcacctccatcaccctgttaaaatagagtttaggaagtggtagacagaggaaagaaaccagcaaagacatgccctctgttcttgctggggtgtggttctggatagaatcgatgtgtgcaaatgatgccagcgaggaatggcagtttcagaatgttcttagtgtccaaggtaaaaccctcaggcttagatttctaagagattaataataaaaacactccacaaggttatttgtactcttagaccttctacaccagctccccccagtgtcaacatcaagaaatggtgaacatgtcaggtaaactcagaaaagccttgggacacccacatgttcagaaaaacctgagataaagatgattaacttccccagaaaggagaaatccctcaataactaaagacaaattatagttaccctgtctaaaaaaacaggggcatctgataattttgatatatttagctggatttgataaatttgatatagtttagctggattgcagctaaaactccaaaccttccattcagagctcttgattctgtagggcaccagtccctctgcccccactggaagaccatattcattcactgttaatgtaggaagcgtagtaaggcccctagcgagaacatggtcattatgtacgagcacagaagacttggctctttagcttgatcaactgtgtctcttggactcctcactactaagtataattaaactaagtatagtttccaaatgagacgataagggcaattactatgtgttgaatgaatattacagcagcaattagagctctgacttctgtcctgccaccagctagctctctccacctctgtttttcatttatgaaatgtatgtgttggacagcagaggtagggaggagaggaaaggaggtcaaagccaagatctttttccagctcttaaatcccagaatttcttataaatggttaatgtaaacaaaaatgagacacacctattaaaatggccaaactccaaaactctgacaactccagatgctggtgaggatgtggaacaatgggaactttgtttttctggttttttttttcttttttgagacaaggtcttgctctgtcacctaggctagagggcagtggtgcaatcttggctcactgcaacctctgcctccagggttcaagtgattctcatgcctcagcctcctgagtaattgggattacaggcataagccaccatgcccagctaatttttgtatttttagtagagacggggtttcactattttgcccaggctcatctcaaactcctggcctcaagtgatctgcctgcctcggcctcccaaagtgctgggattacaggcgtgagctaccacgcccagcagcagtgggaactttgattcattcctagtgggaatgcaaaccagtatagctactgtggatgacagtttggtagtttattacaaaactaaaatataacacaatatataatacttgatattttgataattatatacagtatataatattttataataaatgtgttactggtttgtgtatttactatattttttatcatgttagcatgtagtccttctacttactaaaaaaattaactataaaacagcctctcgggaggctgaggcagaagaattgcttgaacccaggaggcagaggttgcagtgagccaaggtcgtgccattgtactctagcctgggtgacagaacaagactccgtctctacaaaagaaaaaaaaaaaaaaaaacagcctcagcaggcaggtccttcaggaggtattccagaagaaggcattgctctcctaggacaggacagccccatgagtattcttacccctaagaccttccagtgggacaagatgaagaggtggaaaacagtgatactgatgatccagaccctatgtaggactaggctaatgtgtgtgcttgtgtcttcatttttaacaaaaacaagaaaagtttttaaaaatttttttaaataaaaaagcttataaaataagaatagaaagaaaatatttttgtgccactgtataacatgtttgtgttttaccctgttttattacaaaggtaaaaacatttacaattaaaaaatttctaaagtaaagtggcagtaaactagggttgattttttaaaataagcttagtgtggactaaatgtacaatatttaaaacatctacagtagtgtacagcaatgtcctaggccttcacattcgcccaccactcattcactgacttccaatctcacaagctccattcacagtaagtgccctgtacaggtgtaccatttttaaaatcttttgtgtcatatttttactgtatttttctatgtttagatatggtcagatacacaaatatttaccactgcattacagttgcctacagtattcagtatagtaacttgctgtacaggtttgtagcctaagagcaataggacataccacatagcctgagtgtgtactaggctattccatgtaagtttgtgtaactacacgctatgacgtttgcacagagacagatatgatggtgctatacaaagtaagtctagaagagagacaggttggctgctaattcaaccaatatttactggcatcctagcagtataaaccatggaagtgtaagcaaggttaaatgtacttagtcttgaaggagcctctgatgacagtgtcaagtggtcactgctgtaatgacgttctgaacaagggccacatttaagggtgcctaggacagctgaagactgttgactttagatagacttgagccgaagtcttcaaaaagagtgaggaggagaaaacctgtaacactccagggattctgatataagccacttttatgtggataattccaaggctggctttggtgagattattaccatcgttaaggctgttgtttgaatatgataattcaagtaaagcactttggtacgctgcacgacacatagtaaatgattaattggtagcaattattcataaattactgtctgttctccccaagcttctaggcttccctaattaaaattctgatagctttaaagcttttcaagttccaatgcgtaattactgttacaaagcagtaacttgtctgaatcaccagcagcctctagtacaatattagaagcttccagttatttagttaagacttcagcaactagagccatttctggaatactctatgtggactctgccacttgactaaacttcattaaattccaatccagatacccatcccctcagaggaggaggacaggacagttatgcctgcagttataaactgagaagtgttgtgttccaagctctgcatggaattgggtaaattagctacaagcctgaaataaggaagtatgcatctgcgtttttttctttccagcacagaagataagaaaccactttcagggcaaggacaaataccttcttataccccagtatctagcacacaggcactcagttatttttggagaagaaaatctaccataataccactctctcaactaatacatttttcacctaacatgctttttctgaatattaaaaaaactgtgataagatacttggagtatatacttctggcctttattttcctgtgtgcccaaggctatttttccaaaaatgggaccatgatggcgtgttttttgtagaaacttttccagtattactgaataatctaatgatttttaaaatgaagtttcaaatattttaaaaataaatcatccatgtggcaaattaaaaaaactcaatagaaacataaacgaagtgtattcttccatgatgataacactattaaattacttgggaatccttccagagaaaaataaatgcacttacctcaatgtatatgtgctttatttccacaaatgggtcacattctatacactgttctgcatctagggtttttattgagatataattcacagaccagaacgtttacattttaaagtgtataattcagtggctcttagtatatttacaaggttgtatgacttatcgcaactgtctaattccaggatctttctgtcaccttgaaaagaaacctgttagcagtcagtcctcattcctccctcctgcatgccccagcagtgactgatgtactttctgtcttcatagatttggctctcctgggcacttcatatgcaaggaatcatacagtattgtggcactttgcgactagcttttttttcactaaacataatgtttccaaggttcactcatgctgtggcatgtatcagtacttcattctgttgtggccacatagtattctattgtgtggatatatcacattttgtttatccattcaccagtaatggacatatgggttgtttccactttttagcaattttgaatcatggtgccatgaacattcatgtggaaacttgtgtgtgaacgtagttttcaattcaaactacgataagatacttggagtgtatacatctggcctttattttcctgtgtgcccaaggctatttttccaaaaatgagaccatgatagcatgttcttatagaaacttttcctgtattactgaataatctaatgatttttaaaatgaagtttcaaatattttaaaaattatccatgtggcaaatttgaaaaactcaatagaaacataaacgaagtgtattcttccatgatgataacagtattaaattacttgggaatccttccagagaatggcagaagtatatacacttgtgagtggaattgctcagtcaaatggataactctatctttaactttttgcagaaatgccaaatttgtccagagtatctacaccattttacattcccaccagcaatgtttgagggttccaattttttccacttccttgcaacatttgctatttaccattttcttgatcttagccatcctagtgagtataaagtggtatctcactgtgattttcatttgcatgttcctaatgactaatgatatcaagcatcttttcatgtacttattggccatttgagaatcttctttggagaaatgtttattcaaatcctttgcccatttttttttaaagaggcaaggtcttgctttgttgcctaggctggaatgcagcagtacaatcatagctcactgcagccttaaagtcctgagtccaagtgatcctcctgcctcagcctcccaagtagctaagactaaaggcgcaacaccctgcctggctaatttttttattttttatttttgtagagttgggatatcactatgttgcccaggctggccgcaggcaatcctctcacttcagcctcctaaagtgctgggattacaggtgtgagccatcacactggcctcattgtccatattttaattgggttagtctttttattgtagagtttaagaatgttttctatatcctggatactatgctcttacatatgactttaaaaaagaaatagagagggggtcttgccatgttgaccaggctggtctgaaacttcccgcctcaaacaattctcccatctcagcctcccaaagtgttgggattacaggtgtgagccaccgcacctggtggtttacatgtgatttgcaaacattttctccctttctgtgagttatctttttattttttgataatgtcctttgaagcacaaaagttttaaattttgatggagtccagtttacctatttttctgccccccccccacctttatttttttttttttaaatcaagctccttccatgttagcacttgaaggcccacgtcatttcttatctgcatggaacttgcattgtaaggaattctattgtaatttctttaacactttttaaaaattaatggactgggtttttcaggtttttttctgaccattcttgagcatatatcttatacatagctttggctgggcatggtggctcacccctataattctatcactttgggaggctgaagcaggaggaccacttgagcccaggagttcaagaccagatgaccgggcaagaaagtgagaccttatctctctaaaaaaaaaaaagaaaagaaaaggaaaaaatccccaagtaacttcatagcgtaaattctaaaagtggaattgctggatcaaagggggcatgtgtttaaaatcttggcagatattaccaaatttccctcttaacagtataaatgcctgttcctcctccgtcccacccccataactatactggctctgatgagaccttggttttctgtaaaagctctatttagaggtgtatcattatttacttaattgttctcctttacaacccacctgggatgagcatcttgcctagaagtctctacttgcacaggatacatacgaaatagaattgaggattcaaaagcagatacagaactcttcccacttactttcttacccttgtgtgtgtctccccacagggttacaagtgtataacaagtgttggaagtttgagcattgcaatttcaacgacgtcacaacccgcttgagggaaaatgagctaacgtactactgctgcaagaaggacctgtgtaactttaacgaacagcttgaaaatggtgggacatccttatcagagaaaacagttcttctgctggtgactccatttctggcagcagcctggagccttcatccctaagtcaacaccaggagagcttctcccaaactccccgttcctgcgtagtccgctttctcttgctgccacattctaaaggcttgatattttccaaatggatcctgttgggaaagaataaaattagcttgagcaacctggctaagatagaggggctctgggagactttgaagaccagtcctgtttgcagggaagccccacttgaaggaagaagtctaagagtgaagtaggtgtgacttgaactagattgcatgcttcctcctttgctcttgggaagaccagctttgcagtgacagcttgagtgggttctctgcagccctcagattatttttcctctggctccttggatgtagtcagttagcatcattagtacatctttggagggtggggcaggagtatatgagcatcctctctcacatggaacgctttcataaacttcagggatcccgtgttgccatggaggcatgccaaatgttccatatgtgggtgtcagtcagggacaacaagatccttaatgcagagctagaggacttctggcagggaagtggggaagtgttccagatagcagggcatgaaaacttagagaggtacaagtggctgaaaatcgagtttttcctctgtctttaaattttatatgggctttgttatcttccactggaaaagtgtaatagcatacatcaatggtgtgttaaagctatttccttgccttttttttattggaatggtaggatatcttggctttgccacacacagttacagagtgaacactctactacatgtgactggcagtattaagtgtgcttattttaaatgttactggtagaaaggcagttcaggtatgtgtgtatatagtatgaatgcagtggggacaccctttgtggttacagtttgagacttccaaaggtcatccttaataacaacagatctgcaggggtatgttttaccatctgcatccagcctcctgctaactcctagctgactcagcatagattgtataaaatacctttgtaacggctcttagcacactcacagatgtttgaggctttcagaagctcttctaaaaaatgatacacacctttcacaagggcaaactttttccttttccctgtgtattctagtgaatgaatctcaagattcagtagacctaatgacatttgtattttatgatcttggctgtatttaatggcataggctgacttttgcagatggaggaatttcttgattaatgttgaaaaaaaacccttgattatactctgttggacaaaccgagtgcaatgaatgatgcttttctgaaaatgaaatataacaagtgggtgaatgtggttatggccgaaaaggatatgcagtatgcttaatggtagcaactgaaagaagacatcctgagcagtgccagctttcttctgttgatgccgttccctgaacataggaaaatagaaacttgcttatcaaaacttagcatta

SEQ ID NO: 422 - DNA, 4607 bp, Homo sapiens
cagtgctcaaactagaataagcactaattaaaggaattgttgggggtccttcatgtgttcccactcctactggaagacccatgtcggtttccggaaccccaccagtttacccataagcaagactaaacctgatccttgggcaaaagttcctaacccctactttaccctcccaccctcacttttaaatccaccatactgaatgccacactatggaatgcagctacctgccaagcaaggcaatagaaggcaaaaaatggaagtgaattaagatgaactcatctgaaatacacaaatgcattactatctgaagataccagcaagagtttagtctacgtgtataaggctcccagtaggatttagctaggctactagaagttagactgctttcgcattaaacagctaacttcatccacagcaaattgactcaatcaggaaccttcatttgaaggtgtgttagaggatggggtaaatacccgatagctgtctttttggtgaaagaaaaggtgcatttcaagaacttggggggcaggaggaaagcacaatgtttcttagccaggaaagacaaataatccaacgctgctagtcttaaccccagaccagagagaactgcagatctgactgggcctaaattaagtagcttaatgaaaccatgtaattacttgttctcctttcttttgctatagaaaatctaccagtttaaatgagcttcaccttctgggtgaagtttctaaggtcaacatgaatcctcttacctctctcactgctcgtgttctgccttttcaaaaggaccactatgaacagatcagcgcattctctaggccaaaagggctagccaggtggcaagatcaatttagctactttgtattttcagagtcaaattacagacggtttccaaaggtcttgagcatggggctttggcatagcctcaatatatgggagtcactgtgatgagatgtgcctaatgttaatttgatattctgacattgctattttaccagaactaagaacatattgagctggagcttcttgagggcaggagagtattggaaaaggaatccagaagaccctctccactactcaggcagccactattcatctatttttaaagtaccccattttcaggccgggtgtggtggctcatgcctgtaatcccagcactttgggaggcgaggcgggggtggatcacaaggtcaggagaccagcctggccaacatggcgaagccccgtctctactaaaaatacaaaaattagccgggtggtgtggtgggcgcctgtaatcccagctcctcaggaggctgaggcaggagaattgcttgaaaccaggaggcggaggttgcagtgagcccagatcacgccactgcactccagcctgagcaacagagcgactctgtctccaaaaaagaaaaaaagtaccccatgttcagcccctgtgccaaatttgcctaggttttccagctgacaatgaatactgggagttaaaacgcagagtattactatagttaattttctagggttctcttatgaaaagtatatgtaaacacattcatttaaaaatccttggaactcaatgtggaactttaaacattttgcaaaattacatttagagaaacccaatttttcaaagtttaagaaatatacaaagtatgacaaaattatcttcataagaacatgctgcatacttgcctagtagcaaaacaatacagggaagagtcaaaagggcttctccaactgtagaggtacagattgtcttaacctgttcttttctgtacagacttaaaatttctagtggcttttatttttctttgtattttaattttcctacaaagtcctttttggaagttgcagaattattagctttgatgagaacaacttttgtcatagatttgatttattaaaccaaaattatacatattaaaattatatcacaaatatatatgcttccagacaaagaaaagtttgttagtcctgattttctaatcgtagccactcaaggaacagtcctttcatagtaccccaagtatttcaattagacttataaaagtataagtcaatctatggtcagtgtctttggttaaaaaaaaaaaaaaacacaggcagttctttacataaaaacgtcccacacgttatagatgccagccacctcctggtagtcactatggacaactaatgagatgcaaagtcttttggaccgatgatgtctctactactggatctatctgtattaacagcaatgttactctcaatgaaactgcagaagccaccatgaacatggaagaccacctagcagatcggtgagtaggctgcttgttcagctttcctttaacacctgttggtaaatactaatgggagtagacagagttgtatggcctggacagtggaaaccaagagcaggatcgcaaagtaacagcatcagactcttctgccctcctcttgcacttgggttctgactcccagaacaaagaacttgggagaacagtacgggagactgagcagaaaggatgggtttgctgactcgccttgaaatctaactctaacgtaggcagcagtaactcgtctgaacaaatctgattaaataaattcttggggcttacctgtgatgtcacacatacagatctactctccaggaagcaaactcttagcaagttactgccccacttgtaatcactgatctgaaattctcttgttatgaaagaaaagtccttctccccacgaaagacctttaaagacttctacgtatttgaaataccagatactaaggtgtttaaaatgatttctatcattggtaacatcaaacaaaaatagctgcatctggttaagttaaaaagcatcaatactccctcttctggccctacagctgtaccaataggaattctcaccactactcaataacagaaataagtgcctacagccatgatgaatttgtaacattttctcaaattaactacgatttttctaatttcaggtgaaaacccaaggtggtacttcaaacacgcacatgcacacacaaactcagaggacagcgttacaaggaaactaaggaattcctgcattaacaaaggaagacatgttagggggacatcctagccacatatgctttctttgttatatttaggttcattttcattgatactaaacacagacatttaatggcactgataaaaattcaagtaaaaaaaactcaactgaatatgcaaacttaccattataaacaaaatactataaccacaaatcaacactaaaacaaattctgtaagtattttatttatcactgaagaaaaaacacagcagcaagttctgtgttggcttcaatgagaccaaatagttcatctttaacatagctactgcgctccaaaattgaagtcaacacagtcattactacaaattacttgttgaaagaatctatcttcaaaagaaagaaaattaggaaagagaatttaaacgattcctccaaaccatacatttataaatattgtcatatttaaaatgcttgaaaggcatgaattctccattaatggaaaagcagtttgctattggcaacagaaaaaaactcagcgataatttaccaaatgctttaaaatttaaaagctatactgtttggattcacacttgcgcagtaatcttgtcattacaacaactgcaaattgctttgtactcaccttctctcaagtaaaatctaaagaaaaccccaccgtatccaatgtttgtaatgtttacttcaagtgaatctaaaaaatttctaaatttagtttatggtaaatacctcaaaatacctaaaataggtacgtatcaaccacttaagggtgtgaaaattgtttcagattcactgctttaaagggtcttcaaatatattttaacagaaccttacttcattccaaattattatcagatatttcaaaatcaaaaaaaaagtatcagttctataccaagataaaggtgttactcaatacctgaagggtcacattttaaatttattttttagtttttcttttttgtcaacaaatgattgatgaaataatgcaacacccttaaattccagaaaatggcatggtttttccaacctcctgtggatatggtgcatgatcaatctattatataggattaatacaagttcatgctttttgtgttatggtgaaacaacattaaagaatccaatttagattggttgaagcacaagtataataatccttgaatgtgatcaaacctatttaagacaccagtttaaatccattatcttgagacttaacgtcgtactgtggtccatccatcttcatcagtctcatttttagtacgacggagagattccctatctttctcagctctccatgaggccttctctttttcaccttctctttctcggtctcggtctctttctcggtctcttgaaagagctgggggaggaactcgacgaggagggtcccgctcttccacccggtcatctttcctgtcatcagcacgtctccaagaacttactaaaaagtttaattaaaaaaaaaaaattaagttagtactatattctattggctcaaattactcaaaattcctgtactaaagattgttaaatacagaaatcattgttaaacacagaaattctgttaaattctgtattg

SEQ ID NO: 423 - DNA, 1579 bp, Homo sapiens
cagtgctcaaactagaataagcactaattaaaggaattgttgggggtccttcatgtgttcccactcctactggaagacccatgtcggtttccggaaccccaccagtttacccataagcaagactaaacctgatccttgggcaaaagttcctaacccctactttaccctcccaccctcacttttaaatccaccatactgaatgccacactatggaatgcagctacctgccaagcaaggcaatagaaggcaaaaaatggaagtgaattaagatgaactcatctgaaatacacaaatgcattactatctgaagataccagcaagagtttagtctacgtgtataaggctcccagtaggatttagctaggctactagaagttagactgctttcgcattaaacagctaacttcatccacagcaaattgactcaatcaggaaccttcatttgaaggtgtgttagaggatggggtaaatacccgatagctgtctttttggtgaaagaaaaggtgcatttcaagaacttggggggcaggaggaaagcacaatgtttcttagccaggaaagacaaataatccacttttgctagtcttaaccccagaccatagagaactgcagatctgactgggcctaaattaagtagcttaatgaaaccatgtaattacttgttctcctttcttttgctatagaaaatctaccagtttaaatgagcttcaccttctgggtgaagtttctaaggtcaacatgaatcctcttacctctctcactgctcgtgttctgccttttcaaaaggaccactatgaacagatcagcgcattctctaggccaaaagggctagccaggtggcaagatcaatttagctactttgtattttcagagtcaaattacagacggtttccaaaggtcttgagcatggggctttggcatagcctcaatatatgggagtcactgtgatgagatgtgcctaatgttaatttgatattctgacattgctattttaccagaactaagaacatattgagctggagcttcttgagggcaggagagtattggaaaaggaatccagaagaccctctccactactcaggcagccactattcatctatttttaaagtaccccattttcaggccgggtgtggtggctcatgcctgtaatcccagcactttgggaggcgaggcgggggtggatcacaaggtcaggagaccagcctggccaacatggcgaagccccgtctctactaaaaatacaaaaattagccgggtggtgtggtgggcgcctgtaatcccagctcctcaggaggctgaggcaggagaattgcttgaaaccaggaggcggaggttgcagtgagcccagatcacgccactgcactccagcctgagcaacagagcgactctgtctccaaaaaagaaaaaaagtaccccatgttcagcccctgtgccaaatttgcctaggttttccagctgacaatgaatactgggagttaaaacgcagagtattactatagttaattttctagggttctcttatgaaaagtatatgtaaacacattcatttaaaaatccttggaactcaatgtggaacttt

SEQ ID NO: 424 - DNA, 4607 bp, Homo sapiens
cagtgctcaaactagaataagcactaattaaaggaattgttgggggtccttcatgtgttcccactcctactggaagacccatgtcggtttccggaaccccaccagtttacccataagcaagactaaacctgatccttgggcaaaagttcctaacccctactttaccctcccaccctcacttttaaatccaccatactgaatgccacactatggaatgcagctacctgccaagcaaggcaatagaaggcaaaaaatggaagtgaattaagatgaactcatctgaaatacacaaatgcattactatctgaagataccagcaagagtttagtctacgtgtataaggctcccagtaggatttagctaggctactagaagttagactgctttcgcattaaacagctaacttcatccacagcaaattgactcaatcaggaaccttcatttgaaggtgtgttagaggatggggtaaatacccgatagctgtctttttggtgaaagaaaaggtgcatttcaagaacttggggggcaggaggaaagcacaatgtttcttagccaggaaagacaaataatccaacgctgctagtcttaaccccagaccagagagaactgcagatctgactgggcctaaattaagtagcttaatgaaaccatgtaattacttgttctcctttcttttgctatagaaaatctaccagtttaaatgagcttcaccttctgggtgaagtttctaaggtcaacatgaatcctcttacctctctcactgctcgtgttctgccttttcaaaaggaccactatgaacagatcagcgcattctctaggccaaaagggctagccaggtggcaagatcaatttagctactttgtattttcagagtcaaattacagacggtttccaaaggtcttgagcatggggctttggcatagcctcaatatatgggagtcactgtgatgagatgtgcctaatgttaatttgatattctgacattgctattttaccagaactaagaacatattgagctggagcttcttgagggcaggagagtattggaaaaggaatccagaagaccctctccactactcaggcagccactattcatctatttttaaagtaccccattttcaggccgggtgtggtggctcatgcctgtaatcccagcactttgggaggcgaggcgggggtggatcacaaggtcaggagaccagcctggccaacatggcgaagccccgtctctactaaaaatacaaaaattagccgggtggtgtggtgggcgcctgtaatcccagctcctcaggaggctgaggcaggagaattgcttgaaaccaggaggcggaggttgcagtgagcccagatcacgccactgcactccagcctgagcaacagagcgactctgtctccaaaaaagaaaaaaagtaccccatgttcagcccctgtgccaaatttgcctaggttttccagctgacaatgaatactgggagttaaaacgcagagtattactatagttaattttctagggttctcttatgaaaagtatatgtaaacacattcatttaaaaatccttggaactcaatgtggaactttaaacattttgcaaaattacatttagagaaacccaatttttcaaagtttaagaaatatacaaagtatgacaaaattatcttcataagaacatgctgcatacttgcctagtagcaaaacaatacagggaagagtcaaaagggcttctccaactgtagaggtacagattgtcttaacctgttcttttctgtacagacttaaaatttctagtggcttttatttttctttgtattttaattttcctacaaagtcctttttggaagttgcagaattattagctttgatgagaacaacttttgtcatagatttgatttattaaaccaaaattatacatattaaaattatatcacaaatatatatgcttccagacaaagaaaagtttgttagtcctgattttctaatcgtagccactcaaggaacagtcctttcatagtaccccaagtatttcaattagacttataaaagtataagtcaatctatggtcagtgtctttggttaaaaaaaaaaaaaaacacaggcagttctttacataaaaacgtcccacacgttatagatgccagccacctcctggtagtcactatggacaactaatgagatgcaaagtcttttggaccgatgatgtctctactactggatctatctgtattaacagcaatgttactctcaatgaaactgcagaagccaccatgaacatggaagaccacctagcagatcggtgagtaggctgcttgttcagctttcctttaacacctgttggtaaatactaatgggagtagacagagttgtatggcctggacagtggaaaccaagagcaggatcgcaaagtaacagcatcagactcttctgccctcctcttgcacttgggttctgactcccagaacaaagaacttgggagaacagtacgggagactgagcagaaaggatgggtttgctgactcgccttgaaatctaactctaacgtaggcagcagtaactcgtctgaacaaatctgattaaataaattcttggggcttacctgtgatgtcacacatacagatctactctccaggaagcaaactcttagcaagttactgccccacttgtaatcactgatctgaaattctcttgttatgaaagaaaagtccttctccccacgaaagacctttaaagacttctacgtatgtgaaataccaaatactaaggtgtttaaaatgatttctatcattggttacatcaaacaaaaatagctgcatctggttaagttaaaaagcatcaatactccctcttctggccctacagctgtaccaataggaattctcaccactactcaataacagaaataagtgcctacagccatgatgaatttgtaacattttctcaaattaactacgatttttctaatttcaggtgaaaacccaaggtggtacttcaaacacgcacatgcacacacaaactcagaggacagcgttacaaggaaactaaggaattcctgcattaacaaaggaagacatgttagggggacatcctagccacatatgctttctttgttatatttaggttcattttcattgatactaaacacagacatttaatggcactgataaaaattcaagtaaaaaaaactcaactgaatatgcaaacttaccattataaacaaaatactataaccacaaatcaacactaaaacaaattctgtaagtattttatttatcactgaagaaaaaacacagcagcaagttctgtgttggcttcaatgagaccaaatagttcatctttaacatagctactgcgctccaaaattgaagtcaacacagtcattactacaaattacttgttgaaagaatctatcttcaaaagaaagaaaattaggaaagagaatttaaacgattcctccaaaccatacatttataaatattgtcatatttaaaatgcttgaaaggcatgaattctccattaatggaaaagcagtttgctattggcaacagaaaaaaactcagcgataatttaccaaatgctttaaaatttaaaagctatactgtttggattcacacttgcgcagtaatcttgtcattacaacaactgcaaattgctttgtactcaccttctctcaagtaaaatctaaagaaaaccccaccgtatccaatgtttgtaatgtttacttcaagtgaatctaaaaaatttctaaatttagtttatggtaaatacctcaaaatacctaaaataggtacgtatcaaccacttaagggtgtgaaaattgtttcagattcactgctttaaagggtcttcaaatatattttaacagaaccttacttcattccaaattattatcagatatttcaaaatcaaaaaaaaagtatcagttctataccaagataaaggtgttactcaatacctgaagggtcacattttaaatttattttttagtgtttcttttttgtcaacaaatgattgatgaaataatgccacacccttaaattccagaaaatggcatgggttttccaacctcctgtggatatggggcatgatcaatctattatataggattaatacaagttcatgctttttgtgttatggtgaaacaacattaaagaatccaatttagattggttgaagcacaagtataataatccttgaatgtgatcaaacctatttaagacacccagtttaatccattatcttgagacttaacgtcgtactgtggtccatccatcttcatcagtctcatttttagtacgacggagagaatccctatctttctcagctctccatgaggccttctctttttcaccttctctttctcggtctcggtctctttctcggtctcttgaaagagctgggggaggaactcgacgaggagggtcccgctcttccacccggtcatctttcctgtcatcagcacgtctccaagaacttactaaaaagtttaattaaaaaaaaaaaattaagttagtactatattctattggctcaaattactcaaaattcctgtactaaagattgttaaatacagaaatcattgttaaatacagaaattctgttaaattctgtattg

SEQ ID NO: 425 - DNA, 1579 bp, Homo sapiens
cagtgctcaaactagaataagcactaattaaaggaattgttgggggtccttcatgtgttcccactcctactggaagacccatgtcggtttccggaaccccaccagtttacccataagcaagactaaacctgatccttgggcaaaagttcctaacccctactttaccctcccaccctcacttttaaatccaccatactgaatgccacactatggaatgcagctacctgccaagcaaggcaatagaaggcaaaaaatggaagtgaattaagatgaactcatctgaaatacacaaatgcattactatctgaagataccagcaagagtttagtctacgtgtataaggctcccagtaggatttagctaggctactagaagttagactgctttcgcattaaacagctaacttcatccacagcaaattgactcaatcaggaaccttcatttgaaggtgtgttagaggatggggtaaatacccgatagctgtctttttggtgaaagaaaaggtgcatttcaagaacttggggggcaggaggaaagcacaatgtttcttagccaggaaagacaaataatccaacgctgctagtcttaaccccagaccagagagaactgcagatctgactgggcctaaattaagtagcttaatgaaaccatgtaattacttgttctcctttcttttgctatagaaaatctaccagtttaaatgagcttcaccttctgggtgaagtttctaaggtcaacatgaatcctcttacctctctcactgctcgtgttctgccttttcaaaaggaccactatgaacagatcagcgcattctctaggccaaaagggctagccaggtggcaagatcaatttagctactttgtattttcagagtcaaattacagacggtttccaaaggtcttgagcatggggctttggcatagcctcaatatatgggagtcactgtgatgagatgtgcctaatgttaatttgatattctgacattgctattttaccagaactaagaacatattgagctggagcttcttgagggcaggagagtattggaaaaggaatccagaagaccctctccactactcaggcagccactattcatctatttttaaagtaccccattttcaggccgggtgtggtggctcatgcctgtaatcccagcactttgggaggcgaggcgggggtggatcacaaggtcaggagaccagcctggccaacatggcgaagccccgtctctactaaaaatacaaaaattagccgggtggtgtggtgggcgcctgtaatcccagctcctcaggaggctgaggcaggagaattgcttgaaaccaggaggcggaggttgcagtgagcccagatcacgccactgcactccagcctgagcaacagagcgactctgtctccaaaaaagaaaaaaagtaccccatgttcagcccctgtgccaaatttgcctaggttttccagctgacaatgaatactgggagttaaaacgcagagtattactatagttaattttctagggttctcttatgaaaagtatatgtaaacacattcatttaaaaatccttggaactcaatgtggaacttt

SEQ ID NO: 426 - DNA, 1128 bp, Homo sapiens
cggccgcccggctgcttaagccggggctgcaggtgtgcgtgttctgccggaacaacaaggaggcgatggcgggctacaccacccatatcctcaagggccccgacgggcgagtgctgtgtcccgtgctgcgccgctacacgtgtcccctgtgcggcgccagcggcgacaacgcgcacaccatcaagtactgcccgctctccaaagtgccgccgccgcccgcccgcccgccccccctcagcgccagggacggcccgcctggcaagaaaatgcgatgaaggcccgggctcccggccgcccagggtcgccgccgcccctcgcaccgataggtatgcgcaccatctcgcccccgccgtggggaggcgtgcggctcagcggtcggctcgacatgggacgtcgtcctggtggtttttgaaaaacagccgaccgtgtggagtatttccgtgctgaacgattgggactagacgctgaaatccccatttgtcttcagtttctagtttgcacatccagaacggcgaaggctgggtgtgtattccactaactgaaatatggcaacttagaggcgctgtttatttactgtaggggtcgacctctctcccatgcgcatcagtatgaaattgtcacaatcttggatgtttcttcacgccaaaagaggcactttactaggtctagaatatttttttaaaagcctctgaactgagcttaaaactggcgattttatgaaatgtcggcaaaatgcctattttattgtttgaagcgagttaatattctcagttgtctttaaaaatcagttactctaattccaggtgaagcaagccgctggtagcatcacccttatgagaagtgaaggttttgtaaactttccagtattaatttgggcgggtattccccgcttgtggcttgtttctgtcctagctggaggtgtaaaatgcacaatgtgtagcaggtagaatacagctccttatcgttctatgtaccaggtattttattactgaactagcaactagccttttccacctttaaaagttgtgccaagtcataatcatattgtgtataacttggaaatggtgctgtttaaaaaaattgtgtatttatacagtaacagtatgaattcattaatctcacctgtaa

SEQ ID NO: 427 - DNA, 1076 bp, Homo sapiens
acaacaaggaggcgatggcgctctacaccacccatatcctcaagggccccgacgggcgagtgctgtgtcccgtgctgcgccgctacacgtgtcccctgtgcggcgccagcggcgacaacgcgcacaccatcaagtactgcccgctctccaaagtgccaccgccgcccgcccgcccgccgccccgcagcgccagggacggcccgcctggcaagaagctgcgctgaaggcccgggctcccggccgcccaggtcgccgccgcccctcgcaccgctaggtctgcgcaccatctcgcccccgccgtggggaggcgtgcggctcagcggtcggctcgacatgggacgtcgtcctggtggtttttgaaaagcagccgaccgtgtggagtacttccgtgctgaacgattgggactaaacgctgaaatccccatttgtcttcagtttctagtttgcacatccagaacggcgaaagctgggtgtgtattccactaactgaaatatggcaacttaaaggcgctgtttatttactgtatacgtcgacctattttagatgcgcatcagtatgaaattgtctcaatcttggatgtttcattttatgaatggaggcactttactaggtctagaatatttttttaaaagcctctgaactgagcttaaaactggcgattttatgaaatgtcggcaaaatgactattttattgtttgaagcgagttaatattctcagttgtctttaaaaatcagttactctaattccaggtgaagcaagccgctggtagcatcacccttatgagaagtgaaggttttgtaaactttccagtattaatttgggcgggtattccccgcttgtggcttgtttctgtcctagctggaggtgtaaaatgcacaatgtgtagcaggtagaatacagctccttatcgttctatgtaccaggtattttattactgaactagcaactagccttttccacctttaaaagttgtgccaagtcataatcatattgtgtataacttggaaatggtgctgtttaaaaaaattgtgtatttatacagtaacagtatgaattcattaatctcacctgtaa

SEQ ID NO: 428 - DNA, 1695 bp, Homo sapiens
gcggccgcgcccccccgcccatggcgctcgtgcccagcgcccgctacgtgagcgccccgggcccggcgcacccgcagcccttcagctcctggaacgactacctggggctcgccacgctcatcaccaaagcggtggacggcgagccgcgcttcggctgcgcccgcggtgggaacggcggcggcggctccccgccctcctcctcctcgtcgtcctgctgctccccccacacgggggccgggcctggggcgctggggccggcgctggggccgcccgactacgacgaggacgacgacgacgacagcgacgagccggggtcccggggccgctacctggggagcgcgctggaattgcgcgcgctggagctgtgcgcgggccccgccgaggccgggctgctggaggagcgcttcgccgagctgagcccgttcgcgggtcgtgccgccgccgtgctgctgggctgcgcgcccgccgccgccgccgccgccaccaccaccagcgaggcgacgccgcgcgaggagcgggccccggcgtgggcggccgagccccggctgcacgcggcctccggggcggcggccgcccggctgctgaagcccgagctgcaggtgtgcgtgttctgccggaacaacaaggaggcgatggcgctctacaccacccatatcctcaagggccccgacgggcgagtgctgtgtcccgtgctgcgccgctacacgtgtcccctgtgcggcgccagcggcgacaacgcgcacaccatcaagtactgcccgctctccaaagtgccgccgccgcccgcccgcccgccgccccgcagcgccagggacggcccgcctggcaagaagctgcgctgaaggcccgggctcccggccgcccagggtcgccgccgcccctcgcaccgctaggtctgcgcaccatctcgcccccgccgtggggaggcgtgcggctcagcggtcggctcgacatgggacgtcgtcctggtggtttttgaaaagcagccgaccgtgtggagtacttccgtgctgaacgattgggactagacgctgaaatccccatttgtcttcagtttctagtttgcacatccagaacggcgaaggctgggtgtgtattccactaactgaaatatggcaacttagaggcgctgtttatttactgtatacgtcgacctattttagatgcgcatcagtatgaaattgtctcaatcttggatgtttcattttatgaatggaggcactttactaggtctagaatatttttttaaaagcctctgaactgagcttaaaactggcgattttatgaaatgtcggcaaaatgactattttattgtttgaagcgagttaatattctcagttgtctttaaaaatcagttactctaattccaggtgaagcaagccgctggtagcatcacccttatgagaagtgaaggttttgtaaactttccagtattaatttgggcgggtattccccgcttgtggcttgtttctgtcctagctggaggtgtaaaatgcacaatgtgtagcaggtagaatacagctccttatcgttctatgtaccaggtattttattactgaactagcaactagccttttccacctttaaaagttgtgccaagtcataatcatattgtgtataacttggaaatggtgctgtttaaaaaaattgtgtatttatacagtaacagtatgaattcattaatctcacctgtaa

What is claimed is:

1. An isolated nucleic acid molecule comprising a polynucleotide having a nucleotide sequence at least 95% identical to a sequence selected from the group consisting of:
(a) a polynucleotide fragment of SEQ ID NO:X or a polynucleotide fragment of the cDNA sequence contained in Clone ID NO:Z, which is hybridizable to SEQ ID NO:X;
(b) a polynucleotide encoding a polypeptide fragment of SEQ ID NO:Y or a polypeptide fragment encoded by the cDNA sequence contained in cDNA Clone ID NO:Z, which is hybridizable to SEQ ID NO:X;
(c) a polynucleotide encoding a polypeptide fragment of a polypeptide encoded by SEQ ID NO:X or a polypeptide fragment encoded by the cDNA sequence contained in cDNA Clone ID NO:Z, which is hybridizable to SEQ ID NO:X;
(d) a polynucleotide encoding a polypeptide domain of SEQ ID NO:Y or a polypeptide domain encoded by the cDNA sequence contained in cDNA Clone ID NO:Z, which is hybridizable to SEQ ID NO:X;
(e) a polynucleotide encoding a polypeptide epitope of SEQ ID NO:Y or a polypeptide epitope encoded by the cDNA sequence contained in cDNA Clone ID NO:Z, which is hybridizable to SEQ ID NO:X;
(f) a polynucleotide encoding a polypeptide of SEQ ID NO:Y or the cDNA sequence contained in cDNA Clone ID NO:Z, which is hybridizable to SEQ ID NO:X, having biological activity;
(g) a polynucleotide which is a variant of SEQ ID NO:X;
(h) a polynucleotide which is an allelic variant of SEQ ID NO:X;
(i) a polynucleotide which encodes a species homologue of the SEQ ID NO:Y;
(j) a polynucleotide capable of hybridizing under stringent conditions to any one of the polynucleotides specified in (a)-(i), wherein said polynucleotide does not hybridize under stringent conditions to a nucleic acid molecule having a nucleotide sequence of only A residues or of only T residues.

2. The isolated nucleic acid molecule of claim 1, wherein the polynucleotide fragment comprises a nucleotide sequence encoding a protein.

3. The isolated nucleic acid molecule of claim 1, wherein the polynucleotide fragment comprises a nucleotide sequence encoding the sequence identified as SEQ ID NO:Y or the polypeptide encoded by the cDNA sequence contained in cDNA Clone ID NO:Z, which is hybridizable to SEQ ID NO:X.

4. The isolated nucleic acid molecule of claim 1, wherein the polynucleotide fragment comprises the entire nucleotide sequence of SEQ ID NO:X or the cDNA sequence contained in cDNA Clone ID NO:Z, which is hybridizable to SEQ ID NO:X.

5. The isolated nucleic acid molecule of claim 2, wherein the nucleotide sequence comprises sequential nucleotide deletions from either the C-terminus or the N-terminus.

6. The isolated nucleic acid molecule of claim 3, wherein the nucleotide sequence comprises sequential nucleotide deletions from either the C-terminus or the N-terminus.

7. A recombinant vector comprising the isolated nucleic acid molecule of claim 1.

8. A method of making a recombinant host cell comprising the isolated nucleic acid molecule of claim 1.

9. A recombinant host cell produced by the method of claim 8.

10. The recombinant host cell of claim 9 comprising vector sequences.

11. An isolated polypeptide comprising an amino acid sequence at least 90% identical to a sequence selected from the group consisting of:
(a) a polypeptide fragment of SEQ ID NO:Y or the encoded sequence contained in cDNA Clone ID NO:Z;
(b) a polypeptide fragment of SEQ ID NO:Y or the encoded sequence contained in cDNA Clone ID NO:Z, having biological activity;
(c) a polypeptide domain of SEQ ID NO:Y or the encoded sequence contained in cDNA Clone ID NO:Z;
(d) a polypeptide epitope of SEQ ID NO:Y or the encoded sequence contained in cDNA Clone ID NO:Z;
(e) a full length protein of SEQ ID NO:Y or the encoded sequence contained in cDNA Clone ID NO:Z;
(f) a variant of SEQ ID NO:Y;
(g) an allelic variant of SEQ ID NO:Y; or
(h) a species homologue of the SEQ ID NO:Y.

12. The isolated polypeptide of claim 11, wherein the full length protein comprises sequential amino acid deletions from either the C-terminus or the N-terminus.

13. An isolated antibody that binds specifically to the isolated polypeptide of claim 11.

14. A recombinant host cell that expresses the isolated polypeptide of claim 11.

15. A method of making an isolated polypeptide comprising:
(a) culturing the recombinant host cell of claim 14 under conditions such that said polypeptide is expressed; and
(b) recovering said polypeptide.

16. The polypeptide produced by claim 15.

17. A method for preventing, treating, or ameliorating a medical condition, comprising administering to a mammalian subject a therapeutically effective amount of the polynucleotide of claim 1.

18. A method of diagnosing a pathological condition or a susceptibility to a pathological condition in a subject comprising:
(a) determining the presence or absence of a mutation in the polynucleotide of claim 1; and
(b) diagnosing a pathological condition or a susceptibility to a pathological condition based on the presence or absence of said mutation.

19. A method of diagnosing a pathological condition or a susceptibility to a pathological condition in a subject comprising:
(a) determining the presence or amount of expression of the polypeptide of claim 11 in a biological sample; and
(b) diagnosing a pathological condition or a susceptibility to a pathological condition based on the presence or amount of expression of the polypeptide.

20. A method for identifying a binding partner to the polypeptide of claim 11 comprising:
(a) contacting the polypeptide of claim 11 with a binding partner; and
(b) determining whether the binding partner effects an activity of the polypeptide.

21. The gene corresponding to the cDNA sequence of SEQ ID NO:Y.

22. A method of identifying an activity in a biological assay, wherein the method comprises:
(a) expressing SEQ ID NO:X in a cell;
(b) isolating the supernatant;
(c) detecting an activity in a biological assay; and
(d) identifying the protein in the supernatant having the activity.

23. The product produced by the method of claim 20.

24. A method for preventing, treating, or ameliorating a medical condition, comprising administering to a mammalian subject a therapeutically effective amount of the polypeptide of claim 11.
